(19) United States
(12) Patent Application Publication
(10) Pub. No.: US 2011/0098444 A1
(43) Pub. Date: Apr. 28, 2011

(54) METHODS OF PREPARATION AND COMPOSITION OF PEPTIDE CONSTRUCTS USEFUL FOR TREATMENT OF RHEUMATOID ARTHRITIS

(75) Inventor: Daniel H. Zimmerman, Bethesda, MD (US)

(73) Assignee: CEL-SCI CORPORATION, Vienna, VA (US)

(21) Appl. No.: 12/922,687

(22) PCT Filed: Mar. 16, 2009
(86) PCT No.: PCT/US09/37312

§ 371 Date: Jan. 13, 2011

Related U.S. Application Data
(60) Provisional application No. 61/036,566, filed on Mar. 14, 2008.
(60) Provisional application No. 61/100,383, filed on Sep. 26, 2008.

(51) Int. Cl. C07K 19/00; C07K 7/08

(52) U.S. Cl. 530/324; 530/300; 530/326

(57) ABSTRACT

The invention is related to peptide constructs, i.e., polypeptides obtained by linking together two or more peptides based on or derived from different molecules, which are useful in the treatment or prevention of autoimmune diseases, specifically rheumatoid arthritis (RA) and compositions containing same, methods for producing same and methods for using same; wherein the peptide constructs have the formula P₁-x-P₂ where P₁ is a peptide associated with autoimmune disease, allergy, asthma, host-versus-graft rejection, myocarditis, diabetes, and immune-mediated disease, which binds to an antigen receptor on a set or subset of T cells; P₂ is a peptide which will cause a Tₕ2 directed immune response by the set or subset of T cells to which the peptide P₁ is attached or which will bind to a T cell receptor which will cause the set or subset of T cells to which the peptide P₁ is attached to initiate, but not complete, an immune response causing the set or subset of T cells to undergo anergy and apoptosis; and x is a direct bond or linker for covalently bonding P₁ and P₂.

[0001] This invention incorporates by reference the subject matter of U.S. patent application Ser. No. 11/443,314 filed May 31, 2006. The subject matter of the attached “Sequence Listing” is incorporated herein by reference.

### INTRODUCTION

[0002] The invention is related to peptide constructs, i.e., polypeptides obtained by linking together two or more peptides based on or derived from different molecules, which are useful in the treatment or prevention of autoimmune diseases, particularly rheumatoid arthritis, asthma, allergies, and host versus graft (or graft versus host) rejection, as well as to compositions containing same, methods for producing same and methods for using same.

### BACKGROUND

[0003] Autoimmune conditions are characterized by the body attacking itself by mounting an immune response against itself. The goal of these treatments is to turn off, dampen or redirect this inappropriate immune response. The goal of a vaccination approach is to eliminate, reduce or redirect an immune response against self-antigens. As noted by a recent Institutes of Medicine report, autoimmune diseases are a major target area proposed for vaccines and are the third major area for expenditure of healthcare in the US behind cancer and cardiovascular diseases.

[0004] Various antigens often with defined epitopes recognized for some Human Leukocyte Antigens (HLA) genotypes, have been identified, including those associated with Insulin Dependent Diabetes Mellitis (IDDM), Rheumatoid Arthritis (RA) (e.g. collagen type II 390-402 IAGFKGEQGPKGE (SEQ ID NO. 1), Systemic Lupus Erythematousis (SLE), Ankyosing Spondylitis (AS), Pemphius Vulgaris (PV) (epidermal cell adhesion molecule desmoglein 190-204), Multiple Sclerosis (MS), Myelinproteolipid (MPL) (peptide sequence KNIVTPRT (SEQ ID NO. 2), certain types of psoriasis, and uveoretintis (Hammer et al., HLA class I peptide binding specificity and autoimmunity. 1997, Adv. Immunol, 66:67 Tisch et al., Induction of Glutamic Acid Decarboxylase 65-Specific Th2 Cells and Suppression of Autoimmune Diabetes at Late Stages of Disease Is Epitope Dependent 1999, J. Immunol. 163:1178; Yoon et al., Control of Autoimmune Diabetes in NOD Mice by GAD Expression or Suppression in β Cells 1999, Science 284:1183; Ruiz et al., Suppressive Immunization with DNA Encoding a Self-Peptide Prevents Autoimmune Disease: Modulation of T Cell Costimulation 1999, J. Immunol., 162:3336; Krco et al., Identification of T Cell Determinants on Human Type II Collagen Recognized by HLA-DQ8 and HLA-DQ6 Transgenic Mice 1999, J. Immunol., 163:1661). In other cases, peptides are known that induce in animals, a condition similar to ones found in humans, such as GDKVSFFCKNKEKKC (SEQ ID NO. 3) for antiphospholipid antibodies associated with thrombosis (Gharavi et al., GDKV-Induced Antiphospholipid Antibodies Enhance Thrombosis and Activate Endothelial Cells In Vivo and In Vitro 1999, J. Immunol., 163:2922) or myelin peptides for experimental autoimmune encephalitis (EAE) as a model for MS (Ruiz et al., supra, Araga et al., A Complementary Peptide Vaccine That Induces T Cell Anergy and Prevents Experimental Allergic Neuritis in Lewis Rats 1999, J. Immunol., 163:476-482; Karin et al., Short Peptide-Based Tolerogens Without Self-Antigenic or Pathogenic Activity Reverse Autoimmune Disease 1999, J. Immunol., 160:5188; Howard et al., Mechanisms of immunotherapeutic intervention by anti-CD40L (CD154) antibody in an animal model of multiple sclerosis 1999, J. Clin. Invest., 103:281).

[0005] Moreover, glutamic acid decarboxylase (GAD) and specific peptides have been identified associated with IDDM (Tisch et al., supra; Yoon et al., supra). Many of these conditions are also characterized by elevated levels of one or more different cytokines and other effectors such as Tumor Necrosis Factor (TNF) (Kleinau et al., Importance of CD23 for Collagen-Induced Arthritis: Delayed Onset and Reduced Severity in CD23-Deficient Mice 1999, J. Immunol. 162:4266; Preckel et al., Partial agonism and independent modulation of T cell receptor and CD8 in hapten-specific cytotoxic T cells 1998, Eur. J. Immunol., 28:3706; Wooley et al., Influence of a recombinant human soluble tumor necrosis factor receptor FC fusion protein on type II collagen-induced arthritis in mice 1993, J. Immunol., 151:6602) as well as auto-antibodies, including in some cases, anti-costimulator molecules, in particular, those for Cytotoxic T-lymphocyte-Associated protein 4 ((CTLA-4) (CD152)) on CD4+ cells (Matsui et al., Autoantibodies to T Cell Costimulatory Molecules in Systemic Autoimmune Diseases 1999, J. Immunol., 162:4328).

[0006] Efforts are underway to attack cells or cellular products of the immune system and thereby treat autoimmune conditions, allergies, asthma and transplantation rejection using as reagents presumptive antigenic peptides or proteins, peptides representing certain T cells, monoclonal antibodies (Mabs) or recombinant proteins binding various effector cells or molecules such as Tumor Necrosis Factor Alpha (TNFα) and IgE.

[0007] The following immunomodulatory approaches are contrasted with the mode of action for antigen specific products. For example, a fusion protein LFA-3TIP (Amevive™ from Biogen), purportedly a molecule composed of the first extracellular domain of LFA-3 fused to the hinge (CH2 and CH3 domains of human IgG1=TIP) which targets the CD2 receptor on T cells is being evaluated for psoriasis and for xeno- and allograft rejection. LFA-3TIP is bi-functional (i.e., two identical LFA-3 regions and TIP) and therefore is a complex conjugate molecule. According to Biogen, LFA-3TIP is a recombinant fusion protein designed to modulate the immune response by blocking the cellular pathway that activates T cells. Presumably, the compound is acting on a subset of memory effector cells with a down modulation or re-direction of modulation activity.

[0008] Other antigen non-specific approaches also utilize monoclonal antibodies that act on activated T cells and down regulate them such as using anti-CD3 (Protein Design Laboratories) or blocking Antigen Presenting Cells (APC) and T cell interaction by anti-Intercellular Adhesion Molecule 3 ((ICAM-3) (ICOS)). Another such example is MEDI-507 (Medimmune) which is believed to be a humanized monoclonal antibody for psoriasis that also targets CD2 presumably for removing or inactivating those cell types. Other diseases such as tissue transplantation rejection and allergies are also being tested by this approach.

[0009] In contrast to acting on cell surface markers such as ICAM-3, peptide rhu-Mab-E25 (Genentech) binds to circulating IgE with the goal of preventing activation of mast cells. rhu-Mab-E25 is believed to be a humanized monoclonal antibody against IgE. Other researchers are developing monoclonal antibodies to act directly on agents causing disease symptoms. Remicade Infliximab (Centocor) is purported to be a monoclonal antibody to TNFα while anti CD40 ligand has been used for treatment in animal model of MS (Howard et al., supra). A recombinant generated designed protein Enbrel (Immunex) is purported to comprise two molecules of r-DNA derived TNFα soluble receptor, and is intended to block TNFα's action.

[0010] It should be noted, however, that many of these agents are not disease specific and often recognize and could disadvantageously affect normal cellular and body constituents that have a defined and necessary role in needed normal immune defenses.

[0011] One example of an antigen disease specific approach is to treat MS patients by oral administration of myelin proteins. Collagen type II for treatment of patients with Rheumatoid Arthritis can also be used. These treatments are designed to target the Gut Associated Lymphoid Tissues (GALT) to induce tolerance by antigen specific suppression of the immune system. It is not known if these treatments would use the intact protein or a hydrolyzate containing smaller peptides; Wucherpfennig et al., Shared human T cell receptor V beta usage to immunodominant regions of myelin basic protein. 1990, Science, 248:1016; Ota et al., T-cell recognition of an immunodominant myelin basic protein epitope in multiple sclerosis 1990, Nature, 346; 183).

[0012] A related approach to treat autoimmune conditions is the use of an oral formulation of peptide(s) as immunogen given in large quantities. The peptide represents a sequence that is thought to be the autoimmune epitope itself or a modified form which may have altered binding or improved stability properties. By use of the peptide it is believed that either the normal peptide or an Altered Peptide Ligand (APL) will bind to the T cell receptor (TCR) and induce a state of anergy with an antigen presenting cell (APC) (Faith et al., An Altered Peptide Ligand Specifically Inhibits Th2 Cytokine Synthesis by Abrogating TCR Signaling 1999, J. Immunol., 162:1836; Soares et al., Differential Activation of T Cells by Natural Antigen Peptide Analogues: Influence on Autoimmune and Alloimmune In Vivo T Cell Responses 1998, J. Immunol., 160:4768; Croft et al., Partial activation of naive CD4 T cells and tolerance induction in response to peptide presented by resting B cells 1997, J. Immunol., 159:3257, Ding et al., Differential Effects of CD28 Engagement and IL-12 on T Cell Activation by Altered Peptide Ligands 1998, J. Immunol., 161:6614; Hin et al., Cutting Edge: N-Hydroxy Peptides: A New Class of TCR Antagonists 1999, J. Immunol., 163:2363). Some of the approaches with APL include using related amino acids such a D amino acids (Koch et al., A Synthetic CD4-CDR3Peptide Analog Enhances Skin Allograft Survival Across a MHC Class II Barrier 1998, J. Immunol., 161:421), amino acids with substituted side chains (Palma et al., Use of Antagonist Peptides to Inhibit In Vitro T Cell Responses to Par j1, the Major Allergen of Parietaria judaica Pollen 1999, J. Immunol., 162:1982), methylene groups to replace peptide bonds in the peptide backbone (Meda et al., Beta-amyloid (25-35) peptide and IFN-gamma synergistically induce the production of the chemotactic cytokine MCP-1/JE in monocytes and microglial cells 1996, J. Immunol., 157:1213) and N-hydroxyl peptides (Hin et al., supra).

[0013] Various substitutions of side chains of the Major Histocompatibility Complex (MHC) and T cell receptor (TCR) molecules have also been contemplated by the prior art (Clay et al., Changes in the Fine Specificity of gp100₍₂₀₉₋₂₁₇₎-Reactive T Cells in Patients Following Vaccination with a Peptide Modified at an HLA-A2.1 Anchor Residue 1999, J. Immunol., 162:1749). For example, with insulin activity it has been shown that a one amino acid change on the α-chain can abolish its oral immune tolerance activity in two (2) mechanistically different IDDM murine models (Homann et al., Insulin in Oral Immune “Tolerance”: A One-Amino Acid Change in the B Chain Makes the Difference 1999, J. Immunol., 163:1833). Although not an autoimmune epitope, a single change from threonine to alanine can abolish biological activity (Sutherland et al., An 11-Amino Acid Sequence in the Cytoplasmic Domain of CD40 Is Sufficient for Activation of c-Jun N-Terminal Kinase, Activation of MAPKAP Kinase-2, Phosphorylation of IκBα, and Protection of WEHI-231 Cells from Anti-IgM-Induced Growth Arrest 1999, J. Immunol., 162:4720) while a switch from phenylalanine to alanine converts the bee venom phospholipase to an inactive form (Faith et al., supra) as does a switch from tyrosine to alanine convert from active to inactive for another system (Hausman et al., Peptide Recognition by Two HLA-A2/Tax₁₁₋₁₉-Specific T Cell Clones in Relationship to Their MHC/Peptide/TCR Crystal Structures 1999, J. Immunol., 162:5389).

[0014] In yet another approach based on peptide materials, truncated peptides of autoimmune inducing epitope are used as an antagonist in an animal model to treat a particular condition (Karin et al. supra). Synthetic amino acid polymers that are thought to represent epitopes which contain Tyrosine (Y), Glutamic acid (E), alanine (A) and lysine (K) to target T cells such as Copolymer 1 have been contemplated. For example, Copaxone has been used as an oral tolerance delivery approach to treat MS patients where Copaxone is believed to be a synthetic copolymer of four amino acids (Hafler et al., supra 1988, J. Immunol., 141:131). Modified peptides of peptide epitopes are also being studied for treatment of various autoimmune conditions including MS and PV (desmoglein-3) (Hammer, et al., supra 1997, Adv. Immunol., 66:67; Wucherpfennig et al., Structural Basis for Major Histocompatibility Complex (MHC)-Linked Susceptibility to Autoimmunity: Charged Residues of a Single MHC Binding Pocket Confer Selective Presentation of Self-Peptides in Pemphigus Vulgaris 1995, PNAS, 92:11935). The use of myelin proteolipid associated peptide epitope, a polymer or derivative of this epitope for MS has been further contemplated (Hammer et al., supra 1997, Adv. Immunol., 66:67).

[0015] In other approaches, peptides that are unique to the T cell antigen receptor molecule have been contemplated for a psoriasis vaccine such as IR 502 while others have been contemplated for Rheumatoid Arthritis. These peptides are found in a particular part of the variable region usually the third hyper-variable region of the beta chain of the T cell antigen Receptor (TCRαVX) (Kotzin et al., Preferential T-Cell Receptor β-Chain Variable Gene Use in Myelin Basic Protein-Reactive T-Cell Clones from Patients with Multiple Sclerosis 1991, Proc Nat Acad Ssi US, 88:9161; Oksenberg, et al., Limited heterogeneity of rearranged T-cell receptor V alpha transcripts in brains of multiple sclerosis patients. 1990, Nature, 345:344). For example, in an immune response to TCRαV3 (Sutherland et al., supra 1999, J. Immunol., 162:4720) a peptide is generated whose objective is to eliminate particular T cells, and by removing the T cells responsible for the condition, treat the underlying condition. However, this approach has the disadvantageous potential of eliminating other T cells that contain the same αV3 peptide sequence besides the one responsible for the autoimmune condition.

[0016] Still another peptide approach uses complimentary peptide vaccine that induces T cell anergy and prevents EAE in rats by induction of anti-TCR antibodies (a la anti-idiotype) and thereby elimination of these cells (Araga et al., supra 1999, J. Immunol., 163:476).

[0017] For some diseases the appearance of such modified self antigens is part of the disease process, the approach may be completely different. For example in Alzheimer's Dementia (AD), the normally cleared amyloid beta (Aβ) protein fragments are deposited in AD plaques wherein the desired response is to slow down, arrest or even reverse deposition and the subsequent pathological effects.

[0018] To accomplish this therapeutic approach, two basic immunological approaches have been evaluated requiring the use of so called “active” and/or “passive” agents.

[0019] Generally, “passive agents” as known in the art are composed of Mabs targeting cytokines, or cell surface marker, or soluble receptor with similar binding specificity. However, a problem encountered with “passive agents” is that they must be frequently administered parenterally for the life of the patient. Moreover, the Mabs or soluble receptor must be “humanized” (huMab) to allow long term administration and to avoid potential long term adverse effects. Hence, the production and sale of Mabs comprises one of the largest markets for treating chronic long-term conditions in the developed world.

[0020] For autoimmune uses, the use of agents for treatment ranges from insulin for type 1 diabetes to modern biotechnology treatments related to monoclonal antibodies and soluble receptors to complement cytokines and/or cell surface markers. Well known examples of modern biotechnology treatments include Remicade®, Enbrel® Humira® for rheumatoid arthritis, Amieve® and several interferon-β products for MS. Other examples of Mabs include materials used in clinical trials for psoriasis and MS. However, these products only act upon the major abnormal amounts of molecule such as TNF-α, complement, or cells with a particular surface marker and fail to treat the underlying condition.

[0021] For the treatment of AD, Aβ Mabs are being investigated as potential products by a number of private corporations. Notably, one known Aβ Mab investigated by Lilly is effective in decreasing Aβ burden in the cerebral cortex of “AD” mice. This finding confirms previous reports of beneficial effects of plaque reduction in “AD” transgenic mice by other known Ab both Mab and Pab investigated by Elan (Bard et al., Epitope and isotype specificities of antibodies to beta-amyloid peptide for protection against Alzheimer's disease-like neuropathology, Proc Natl Acad Sci U.S.A. 2003 Feb. 18; 100 (4):2023-8; DeMattos et al. Peripheral anti-A beta antibody alters CNS and plasma A beta clearance and decreases brain A beta burden in a mouse model of Alzheimer's disease, Proc Natl Acad Sci U.S.A. 2001 Jul. 17; 98 (15):8850-5).

[0022] However, it should be noted that not all of the known Mab anti-Aβ being tested were shown to be effective (Bard et al. supra). Differences have been found in the ability of the respective antibodies to pass the Blood Brain Barrier (BBB). Clearly, the mechanism by which Aβ plaques are reduced is not understood.

[0023] For example, the necessity for inclusion of the Fc region was shown to be required in one compound entitled 3D3 which was found in the Central Nervous System (CNS) (Bard et al.). The Mab 3D3 was mediated by binding to phagocytes. It was shown by the art that 3D3 (IgG2b) and 10D5 (IgG1) were effective in reducing Aβ plaques but not 16C11 (IgG1) and 21F12 (IgG2a). Both IgG2a and IgG2b subclasses are considered as complement fixing antibodies that bind to Fc receptors. Furthermore, an association between Aβ plaque reduction and affinity of the Mabs was not validated. Further, Mab m266, is believed to act on CNS Aβ levels by serving as a sequestering agent acting from its plasma location given that it is not found in the CNS (DeMattos et al). It appears from the art that m266, 3D3 and 10D5 act by different mechanisms in plaque clearance wherein all three Mabs act as Aβ sinks in dialysis assays.

[0024] With regard to “active agents” in the treatment of Aβ, the objective is to induce the body to produce molecules to counteract or neutralize the agent. Hence, “active agents” can be considered vaccines that induce a long lived adaptative immune response in patients through induction of antibodies and/or by Cytotoxic Lymphocytes (CTL) or other cellular mechanisms to clear or impede the deposition of Aβ. Several reports have shown induction of immune responses having effects on plaque formation in murine AD models (Schenk et al. 1999 Immunization with amyloid-beta attenuates Alzheimer-disease-like pathology in the PDAPP mouse Nature 400: 173, Sigurdsson et al. 2001 Immunization with a nontoxic/nonfibrillar amyloid-beta homologous peptide reduces Alzheimer's disease-associated pathology in transgenic mice Am J Pathol 159:439).

[0025] The role of antibodies has been implicated in both the “passive” and the “active” immunization approach. However, the role of CTL or other cellular responses is less certain. For example, antibody alone may be sufficient for plaque clearance (Schenk et al., supra).

[0026] In spite of the state of the art with respect to recombinant proteins and their use as therapeutics, only a very few recombinant proteins based vaccine are available as an approved successful vaccine, for Hepatitis B surface protein (HBsAg). Recombinant protein vaccines for HSV, several other viruses, Chylamdia, Lyme disease have all either not been commercially successful or failed to meet approvable criteria and scientists using them are now looking for enhancers such as cytokines, new adjuvants etc.

[0027] Major problems are also associated with viral vector vaccines. The primary problem is the immune response induced against the vector itself. This induced immune response severely limits the number and frequency of subsequent injections/boosters that can be administered. Moreover, some adenoviruses have the potential for causing allergic conditions such as celiac disease. It is also known that many viral proteins, including some from HIV and HSV contain immunosuppressive epitopes. Viral proteins are also suspected as causative agents for other autoimmune conditions such as type 1 diabetes, Multiple Sclerosis (MS), Myocarditis, and Graves disease.

[0028] Similarly, virus like particles (VLP) also suffer from the same disadvantages noted for viral vector vaccines whereby the particles incorporate antigenic epitope(s) of the plant, animal or bacterial virus (plasmid) where it is expressed in the VLP containing the foreign antigen of interest perhaps in a fusion protein along with the epitopes of the host virus or plasmid.

[0029] Another disadvantage in using a DNA-based vaccine including for autoimmune conditions is the possibility of the vaccine DNA being integrated into the host's genome. One alternative is to conjugate a particular epitope to a carrier protein to avoid such incorporation into the genome. It is known within the art to use large carrier proteins such as Keyhole Limpet Hemocyanin (KLH), Bovine Serum Albumin (BSA), or Antigenics' heat shock proteins (HSP) coupled/conjugated or incorporated with a virus protein.

[0030] Other options for peptide delivery of peptide epitopes include the use of synthetic biodegradable microparticles like Poly(lactide-co-glycolide) PLG with aggregated antigen. Still other delivery technologies for peptide antigens include AutoVac™ of Pharmexa. Other small molecule delivery technologies for peptides are Antigen Express's ‘Ii-Key’ delivery, phage display and Multiple Antigen Presentation (MAPS) technologies (Rosenthal 2005 Immune peptide enhancement of peptide based vaccines Frontiers in Bioscience 1:478-482).

[0031] But again, many of the known approaches have the major disadvantage of using large, very immunogenic carriers. Moreover, patient populations requiring such therapeutics have usually been exposed to many of these same antigens during their lifetimes. Hence, and similar to vaccine vector delivery of antigens, clearance of the antigen can be so vigorous in the previously exposed host that no response will occur to the new antigen. On the other hand, a strong immune response may occur upon reintroduction of the vector. For example, in the case of the conjugate VP22 containing HSV-1 protein, the response may be undesirable given that a majority of adults have had one or more exposures to HSV-1 (Muran-yiova et al. 1991 Immunoprecipitation of herpes simplex virus polypeptides with human sera is related to their ELISA titre. Acta Virol. 35:252-9).

[0032] Hence, it is critical that the therapeutic be a small peptide used as a potential antigen as in Epimmune's Padre™ or CEL-SCl's Ligand Epitope Antigen Presenting System (L.E.A.P.S.™) technology as described in U.S. Pat. No. 5,652,342, the contents of which are incorporated herein by reference.

[0033] L.E.A.P.S. uses small peptides referred to as T cell Binding Ligands (TCBL's) as a peptide antigen delivery technology wherein the TCBL's are peptide sequences derived from the human immune system molecules known or suspected to bind to human T cells. Although L.E.A.P.S. includes a first peptide which is an antigenic peptide associated with disease or the causative organism of disease covalently bonded to a second peptide which is a T cell binding ligand, the hetero-functional cellular immunological reagents taught by U.S. Pat. No. 5,652,342 are not antigen (disease) specific in certain cases. Instead, U.S. Pat. No. 5,652,342 teaches T cell binding ligands including portions of MHC Classes I and II or accessory molecules such as β-2-microglobulin, portions of LFA-3, portions of the Fc region of the heavy chain of immunoglobulins, and Ia⁺ molecules and generally teaches for the antigens associated with auto-immunity such as IDDM, RA and Thyroiditis, further the patent fails to provide more antigen (disease) specific treatment.

[0034] Hence, there is a need for approaches to treating autoimmune diseases with immunotherapeutics requiring more specific and lower doses of active substance and less frequent dosing. The therapeutics should also allow for the option of subcutaneous, oral intradermal, intranasal or transdermal administration wherein the active portion of the therapeutics should be comprised of substantially smaller molecules (3-5000 Da) that are more likely to be able to cross the blood brain barrier.

[0035] Moreover, the need extends to treatments that do not require monoclonal antibodies or receptor agonists to molecules that are critical to maintaining normal body function such as TNF-α Soluble Receptor or those that require “humanization”.

[0036] There is further a need for therapeutics that does not eliminate essential or necessary T cells other than those responsible for the underlying disease. The therapeutics should only act upon the major abnormal molecule or cell while preventing or inducing a high response against the vector or delivery molecule.

[0037] There is further a need for a therapeutic that is not integrated into the host's genome wherein it may alter other normal or onco genes, their expression or activation.

[0038] There is still further a need for providing specific antigenic peptides associated with disease or the causative organism that can be linked with a T cell binding ligand such as L.E.A.P.S. Moreover, the therapeutics should be manufactured and be cost effective in its production and stable during storage before use.

### BRIEF SUMMARY OF THE INVENTION

[0039] The present invention provides peptide constructs useful for treatment of autoimmune disease, particularly for rheumatoid arthritis, asthma, allergy, and tissue transplantation rejection (including both host-versus-graft and graft-versus-host rejection), which differ from the above approaches used with antigenic peptide alone. The novel constructs bind in an antigen specific manner and redirect the T cell in the direction of a non-deleterious autoimmune response, primarily from a Th1 to a Th2 immune response, but where advantageous, primarily from a Th2 to a Th1 immune response. Alternatively, the novel constructs include one peptide component which will bind to T cells associated with autoimmune disease, asthma, allergies or host versus graft or graft versus host rejection while a second peptide component will bind to sites on the T cells which will preclude the normal sequence of events required for cell activation thereby initiating an abortative T cell modulation resulting in cell anergy and apoptosis.

[0040] Specifically, the novel peptides of this invention include peptide constructs of the following formula (I):

P₁-x-P₂ (I)

where P₁ is a peptide associated with autoimmune disease, allergy or asthma, or tissue transplantation rejection and which will bind to an antigen receptor on a set or subset of T cells; P₂ is an immune response modifying peptide which will (i) cause a directed immune response by said set or subset of T cells to which the peptide P₁ is attached or (ii) bind to a T cell receptor which will cause said set or subset of T cells to which the peptide P₁ is attached to initiate, but not complete, an immune response causing said set or subset of T cells to undergo anergy and apoptosis; and x is a direct bond or linker for covalently bonding P₁ and P₂.

[0041] The present invention also provides a first method for treating or preventing inappropriate autoimmune response in individuals at risk for autoimmune disease, allergic reactions, asthma or host-graft or graft-host rejection, wherein a pharmacologically effective amount of a peptide construct of formula (I) is administered to the individual to effectively eliminate the set or subset of T cells involved in the autoimmune response.

[0042] The present invention also provides a second method for modulating an inappropriate autoimmune response in individuals at risk for autoimmune disease, allergic reactions, asthma or host-graft or graft-host rejection, wherein a pharmacologically effective amount of a peptide construct of formula (I) is administered to the individual to redirect the autoimmune response from a Th1 to a Th2 immune response, or from a Th2 to a Th1 immune response, whereby the inappropriate autoimmune response is modulated to decrease or eliminate the adverse effects associated with the inappropriate autoimmune response.

### BRIEF DESCRIPTION OF THE DRAWINGS

[0043] The invention will now be explained in greater detail by the following description and specific embodiments and with the aid of the accompanying drawings:

[0044] FIG. 1 represents data from mice received two treatments of 33 nmoles (for CEL-2000 equivalent to 4.8 mg/kG) of CEL-2000, (the same dose as used for the L.E.A.P.S. HSV vaccines), or other conjugates of the same collagen peptide used in CEL-2000 (SEQ ID NO. 852) using the same ICBLs as in the HSV or EAM systems for comparison using a GMP grade ICFA adjuvant. Shown is group average AI score+/−sd for controls (No Disease) induced squares bottom flat line curve, (Disease induced no Treatment [Upper diamond]), disease induced Enbrel given every day [open right side up triangle] and 3 vaccine groups (CEL-2000 [big X], CEL-2001 (CII (SEQ ID NO 836) conjugated to CEL-1000 (SEQ ID NO. 50) [open circles] (═SEQ ID NO. 842) and CEL-2002 (CII peptide alone (SEQ ID NO 836) [upside triangle]) treatment groups.

[0045] FIG. 2 represent a study where CEL-2000 treatment with 2 doses of 33 or 100 nmol (the dose used in the EAM study) was given subcutaneously on days 0 and 7 as in the EAM study or 0 and 14 as for the HSV. Most regimes reduced the progression of arthritis disease to levels that were at least as good as those of mice treated with Enbrel (every other day for the 28 days of the study). Immunization of mice with the 100 nmol dose (3× treatment) on days 0 and 7 appeared to limit the progression of disease throughout the experimental period. The CEL-2003 links the murine CII₂₅₄₋₂₇₃ sequence to the J ICBL. This trial suggests that the dosage and schedule of administration (time between initial and second immunization) are important parameters for CEL-2000 treatment. Use of a student “t” Test analysis of Treatment groups at day 7 days 14 and 21 to calculate the p value showed the 3× dose of CEL-2000 on day 0 and 14 followed by 3× on day 0 and 7 or 1× on day 0 and 7 is equivalent to 0 and 14 and slightly better than Enbrel every other day for all 28 days.

[0046] FIG. 3 represents CIA Model analysis of foot pad thickness as evidence of CEL-2000 therapeutic vaccine efficacy. The animal groups and vaccines used are described in FIGS. 1 and 2. Measurement of the footpad thickness of the mice for the first two weeks of vaccine therapy was compared to Enbrel therapy as a more independent and completely objective measurement.

[0047] FIG. 4 represents a summary plot of the analysis performed cores of the 4 tissue areas, pannus membrane, inflammation, bone and cartilage from the following groups: Control no disease; CIA disease: CIA Disease Enbrel daily for 14 days continued for 2 more weeks before termination: CEL-2000 and CEL-2001 groups (vaccinated on day 0 and 7) from study 1 (FIG. 1) and from study 2 (FIG. 2) 1× and 3× CEL-2000 vaccinated groups on day 0 and 7.

### DETAILED DESCRIPTION OF THE INVENTION

[0048] It has been reported that the, failure of mature CD8 cells to simultaneously engage their TCR and CD8 co-receptor, triggers an activation process that begins with inhibition of CD8 gene expression through methylation and concludes with up-regulation of surface Fas and Fas ligand and cellular apoptosis (Pestano et al., Inactivation of Misselected CD8 T Cells by CD8 Gene Methylation and Cell Death 1999, Science, 284:1187). This is consistent with the results of others where if full engagement of certain very major coreceptors are not effected then an activation process, but abortative in nature, leading to apoptosis occurs (see also Gogolak et al., Collaboration of TCR-, CD4- and CD28-mediated signaling in antigen-specific MHC class II-restricted T-cells 1996, Immunol. Let. 54:135; Grakoui et al., The Immunological Synapse: A Molecular Machine Controlling T Cell Activation 1999, Science, 285:221; Malissen, Dancing the Immunological Two-Step 1999, Science, 285:207; Redpath et al., Cutting Edge: Trimolecular Interaction of TCR with MHC Class II and Bacterial Superantigen Shows a Similar Affinity to MHC:Peptide Ligands 1999, J. Immunol., 163:6; Preckel et al., supra 1998, Eur. J. Immunol., 28:3706; Sambhara et al., Programmed cell death of T cells signaled by the T cell receptor and the alpha 3 domain of class I MHC 1991, Science, 252:1424; Kishimoto et al., Strong TCR Ligation Without Costimulation Causes Rapid Onset of Fas-Dependent Apoptosis of Naive Murine CD4⁺ T Cells 1999, J. Immunol., 163:1817; Kubo et al., CD28 Costimulation Accelerates IL-4 Receptor Sensitivity and IL-4-Mediated Th2 Differentiation 1999, J. Immunol., 163:2432).

[0049] Therefore, a different approach would be to have a modulation but not with a full sequence of events that cause diseases, the construct binding in an antigen specific manner with the antigenic epitope but the TCBL ligand binding to a site on another molecule associated with certain early events that are early intermediates in the full expression pathway thereby occupying the space and causing an early event in the process of activation (such as Ca⁺⁺ flux, activation of various phosphatases, membrane migration events, such as “patching” or “capping”, changes in RNA metabolism) but not supporting the complete activation process which can be thought of as culminating in antigen specific antibody or non-antibody mediated specific Cytotoxic T Lymphocyte activity such as killing of infected or tumor cells, by acting on DNA synthesis, cell division, or cytokine secretion, namely, without allowing the ultimate tertiary complex of binding events (MHC, antigen TCR and CD4 (or CD8)) necessary for full activation by being out of the normal temporal sequence of events. Perhaps this early binding would be of such strength that it does not disassociate and allow the cell surface rearrangement necessary for the full and normal sequence of modulatory events, such as, proliferation or secretion of late cytokines such as Fas, TNF-α or IFN-γ and thereby prohibiting events found in an autoimmune disease associated pathway with complete T cell activation. For example, initially after antigen binding to the TCR ICAM-1 (also known as CD54) on APC binding to a T cell's LFA-1 (also known as CD11a/CD18) there is a shifting away and a rearrangement with clustering of the MHC and antigenic peptides on APC binding eventually by migration on T cell membrane to a clustering of TC and CD4 (or CD8) (Malissen supra 1999, Science, 285:207; Grakoui et al., supra 1999, Science, 285:221).

[0050] According to one embodiment of this invention, such rearrangement is prevented by the close association in a peptide construct using a TCBL from ICAM-1, LFA-3 (aa26-42), VLWKKQKDKVAELENSE (SEQ ID NO. 4) (Osborn et al., Amino acid residues required for binding of lymphocyte function-associated antigen 3 (CD58) to its counter-receptor CD2 1995, JEM, 181:429), by either the disparity in the temporal binding or higher strength of binding activity, thereby preventing the rearrangements and other more intimate interactions necessary for activation. Initially these sites are close together but normally rearrangements on the T cell surface occur during the activation process so by preventing this shift activation should not occur Likewise, a TCBL from CD4 that binds to the TCR and CD3 may be used as the TCBL in the peptide construct of this invention. Its binding to the T cell recognition site will inhibit subsequent events from occurring (MHC II with CD4 or β-2 with CD8).

[0051] Still another approach is a construct which redirects the immune response initiated by the natural autoimmune inducing event from a TH1 to a TH2 response (e.g., Lowrie et al., Therapy of tuberculosis in mice by DNA vaccination 1999, Nature, 400:269; Tisch et al., supra 1999, J. Immunol., 163:1178). As used herein, a TH2 directed response is one which directs the immune response toward the TH2 direction, thus favoring production of TH2 associated cytokines IL-5, IL-4, IL-10, IL-13 TNF-α and antibody isotypes IgG1 and IgG3 in mice (or comparables in man) as opposed to Th1, where the immune response favors production of cytokines IFN-γ, IL-2, IL-6, IL-12 cytokines and antibody isotypes IgG2a and IgG2b in mice and Cytotoxic T cell activity. It is understood, of course, that a “TH2 directed response” is not intended to imply an exclusively TH2 response, but rather a mixed immune response which is weighted to favor a TH2 profile.

[0052] According to this embodiment a TCBL associated with TH2 responses; e.g., peptide G from MHC class II (Zimmerman et al., A new approach to T cell activation: natural and synthetic conjugates capable of activating T cells 1996, Vacc. Res., 5:91, 5:102; Rosenthal et al., 1999, Vaccine), IL-4 or IL-5 or peptides known to stimulate IL-4 or IL-5 synthesis are used as the TCBL along with the autoimmune inducing peptide (e.g., Hammer et al., supra, Krco et al., supra, Araga et al., supra, Ota et al., supra, Ruiz et al., supra, Yoon et al., supra, Dittel et al., Presentation of the Self Antigen Myelin Basic Protein by Dendritic Cells Leads to Experimental Autoimmune Encephalomyelitis 1999, J. Immunol., 163:32; Gautam et al., A Viral Peptide with Limited Homology to a Self Peptide Can Induce Clinical Signs of Experimental Autoimmune Encephalomyelitis 1998, J. Immunol., 161:60, the disclosures of which are incorporated herein by reference thereto) in the peptide conjugate. These peptide constructs may be used, for example, to treat type I diabetes. In an animal model the mechanism of diabetes prevention in the RIP-NP model was shown to be mediated by insulin β-chain, and IL-4 producing regulatory cells acting as bystander suppressors (Homann et al., supra 1999, J. Immunol., 163:1833). Such redirection of immune responses have been previously reported by a DNA vaccine for TB which redirected the immune response from an inefficient response TH2 to a response that was a very effective Th1 (Lowrie et al., supra 1999, Nature, 400:269). Thus, redirecting an already existing immune response from a TH1 to a TH2 would be effective for treating autoimmune related diseases. A TCBL involved in CD28 costimulation (Kubo et al., supra) could also be effective for this purpose. If, on the other hand, the need was to redirect from a TH2 to a TH1, much less likely to be needed since many autoimmune conditions are thought to be the manifestation of deleterious TH1 effects, then a TCBL such as peptide J, DLLKNGERIEKVE (SEQ ID NO. 51) (Zimmerman et al., supra; Rosenthal et al., supra) or ones known to stimulate IL-2 or IL-12 synthesis would be used along with the autoimmune inducing peptide.

[0053] Yet another approach is to use the peptide construct to not activate the normal immune process but to activate the process leading to apoptosis of the T cell by using as the TCBL a ligand that binds to a site on the T cell whose normal binding and activation leads to apoptosis of the T cell; such as the TNF-receptor of the T cell, in which the TCBL would be the TNF-α ligand portion. Examples of such TNF peptides known to activate macrophages are amino acids 70-80 PSTHVLITHTI (SEQ ID NO. 5) (Britton et al., 1998, I & I, 66:2122) and perhaps the antagonist peptide represented by DFLPHYKNTSLGHRP (SEQ ID NO. 6) of another region (Chirinos-Rojas et al., A Peptidomimetic Antagonist of TNF-α-Mediated Cytotoxicity Identified from a Phage-Displayed Random Peptide Library 1998, J. Immunol., 161:5621). It has been suggested in WO 99/36903A1 that the H4-1-BB ligand is useful as a treatment for autoimmune disease similar to uses for flt3-L and CD40L; therefore, H4-1BB may also be used as TCBL for inclusion with autoimmune antigens to form the inventive peptide construct. Other such TCBL examples are available from application with Fas and Fas-ligand including the noncleavable Fas-ligand (WO 99/36079A1).

[0054] Since autoimmune reactive cells in disease are most likely already activated and may be expressing Fas (Tomita et al., Tetrapeptide DEVD-aldehyde or YVAD-chloromethylketone inhibits Fas/Apo-1(CD95)-mediated apoptosis in renal-cell-cancer cells 1996, Int. J. Can., 68:132; Lie et al., Synthesis and biological activity of four kinds of reversed peptides 1996, Biol. Pharma. Bul. 19:1602) the Fas-Ligand or the sequence obtained by reverse engineering technique to determine amino acid (aa) sequence acting as receptor for DEVD-aldehyde or YVAD (SEQ ID NO. 22) chloromethylketone, may also be used as the TCBL. Representatives from another pair, IFN-γ and the IFN-γ ligand can also be used as TCBL's in the invention peptide constructs.

[0055] In this invention the antigenic peptide and the peptide for T cell binding (TCBL) may be directly linked together in any order (i.e., N-terminal of one to C-terminal of other or vice versa) or the peptide may be covalently bonded by a spacer or linker molecule. With regard to linkers between the two domains, suitable examples include a thioether bond between an amino terminus bromoacetylated peptide and a carboxyl terminus cysteine, often preceded by a diglycine sequence (Zimmerman et al., supra), carbodiimide linkages, a multiple glycine, e.g., from 3 to 6 glycines, such as triglycine, with or without one or two serines, separation between the two entities, e.g., GGGS (SEQ ID NO. 7), GGGSS (SEQ ID NO. 8), GGGGS (SEQ ID NO. 9), GGGGSS (SEQ ID NO. 10), GGGSGGGS (SEQ ID NO. 11), etc., and other conventional linkages, such as, for example, the direct linkages such as, EDS, SPDP, and MBS, as disclosed in the aforementioned U.S. Pat. No. 5,652,342.

[0056] Thus, the peptide constructs of this invention may be conveniently represented by the following formula (I):

P₁-x-P₂ (I)

[0057] where P₁ is a peptide associated with autoimmune disease, allergy or asthma, or transplantation rejection and which will bind to an antigen receptor on a set or subset of T cells;

[0058] P₂ is an immune response modifying peptide which will bind to T cells to cause a directed immune response by said set or subset of T cells to which the peptide P₁ is attached or which will bind to a T cell receptor which will cause said set or subset of T cells to which the peptide P₁ is attached to initiate, but not complete, an immune response causing said set or subset of T cells to undergo anergy and apoptosis; and x is a direct bond or linker for covalently bonding P₁ and P₂.

[0059] The TCBL portion of the immunomodulatory peptide construct of this invention, i.e., P₂, may comprise a discontinuous epitope composed of two small regions separated by a loop or by a single chain short peptide in place of the loop (Shan et al., Characterization of scFv-Ig Constructs Generated from the Anti-CD20 mAb 1F5 Using Linker Peptides of Varying Lengths 1999, J. Immunol., 162:6589). For example, an eight amino acid group, LRGGGGSS (SEQ ID NO. 12), of 11.2 Angstroms in length (Reineke et al., A synthetic mimic of a discontinuous binding site on interleukin-10 1999, Nature Biotechnology, 17:271) has been used to form a single peptide from two smaller discontinuous peptides of IL-10, thereby forming a TCBL which could be used for redirection from a TH1 to a TH2, in combination with, for example, the IDDM, PV or MS inducing epitopes (Hammer et al., supra Tisch et al., supra).

[0060] Linkers (X) of varying lengths to form a single chain may be used, for example, GGGS (SEQ ID NO. 7), GGGGS (SEQ ID NO. 9), including, from among 1 or more repeats of this tetrapeptide or pentapeptide, e.g., GGGSGGGS (SEQ ID NO. 11), GGGSGTGSGSGS (SEQ ID NO. 52). Such linkers may result in a tertiary structure which might be of use to form a more avid TCBL (Shan et al., supra).

[0061] Although not strictly limited, the peptide constructs of this invention may have as many as about 200 amino acids in its sequence, preferably up to about 150 amino acids, and especially, up to about 100 amino acids. The minimum number of amino acids is also not strictly limited but usually each of the peptide components P₁ and P₂ will have at least about 4, preferably at least about 6, and more preferably at least about 8 or 9 amino acids in order to provide the appropriate epitope configuration for effectively binding to the appropriate site on the T cells of interest. Thus, the peptide constructs of this invention will usually contain from about 20 to about 100 or more amino acids.

[0062] The peptide constructs may be prepared using conventional solid state peptide synthesis, provided however, that for constructs having more than about 40 amino acids, especially more than about 50 amino acids, it is usually convenient and preferred to prepare shorter segments and then link the shorter segments using well known techniques in solid phase peptide synthesis.

[0063] The peptide constructs may be prepared using conventional solution phase condensation chemistry of smaller peptides prepared by solid phase peptide synthesis, provided however, that for constructs having more than about 40 amino acids, especially more than about 50 amino acids, it is usually convenient and preferred to prepare shorter segments and then link the shorter segments using well known techniques in solid phase peptide synthesis.

[0064] Alternatively, the peptide constructs of this invention may be prepared using well known genetic engineering methods. Further details on methods for producing the instant peptide constructs can be found in the aforementioned U.S. Pat. No. 5,652,342.

[0065] Improved versions of the peptide constructs are comprised of variables X₁ to X₁₂ substitutions where each of X₁ to X₁₂ describe a group of particular types of amino acids based on their features. For example, it is known that amino acids can be nonpolar, hydrophobic while another group of amino acids are polar, uncharged amino acids that are hydrophilic. Still further, it is known that amino acids can be grouped as those that are polar, charged, hydrophilic amino acids further subdivided between acidic and basic amino acids. Table 1 describes the chemical and structural features along with the corresponding amino acids.

TABLE 1

| Chemical or | |
|---|---|
| Structural Feature | Amino Acid |
| Polar/hydrophilic | N, Q, S, T, K, R, H, D, E, (C, Y)* |
| Non-polar/hydrophobic | (G), A, V, L, I, P, Y, F, W, M, C |
| H-bonding | C, W, N, Q, S, T, Y, K, R, H, D, E |
| Sulfur containing | C, M |
| Charged at Neutral | D, E, (C) |
| pH Negative/acidic | |
| Charged at Neutral | K, R, (H) |
| pH Positive/basic | |
| Ionizable | D, E, H, C, Y, K, R |
| Aromatic | F, W, Y, (H, no UV absorption) |
| Aliphatic | G, A, V, L, I, P |
| Forms covalent | C |
| cross-link (disulfide bond) | |
| Cyclic | P |

*Note: Amino acids in parentheses have the indicated character to a limited extent.

[0066] Table 2 describes the amino acids for X₁ to X₁₀ wherein the amino acids for X₁ to X₁₀ have been selected on their common chemical and structural features as shown in Table 1 for inclusion in the improved variants of the invention. Instances of X₂X₃ or X₃X₂ or X₂X₃ or X₃X₂ or X₃X₃ or X₂X₂ can be replaced by X₁₁ or by gamma amino butyric acid (GABA) wherein the common feature is that the amino function is on the γ-carbon and not the α-carbon. Instances of X₁X₁ or X₁X₃ or X₃X₁ or X₁X₂ or X₂X₁ can be replaced by X₁₅. Modifications for increased stability at the amino terminus by use of an acetyl or propionyl group, D glycine or D alanine or use of cyclohexylalanine at the amino terminus to reduce proteolysis are contemplated by the substitution of X₁₂. As shown in the improved variants of the sequence, X₁₂ can be present or not present on the sequence. It is noted that the sequences in computer readable form do not include X₁₂. However, the presence of the modification is present for all sequences where disclosed in the instant specification. Similarly, modifications by use of 5-aminopentanoic acid for replacement of lengths of 3 or 4 amino acids of X₂ and X₃ are also contemplated by the invention and represented as X₁₃ wherein the lengths of 3 or 4 amino acids of X₂ and X₃ can be replaced by 5-aminopentanoic acid. Although X₁₃ is not properly an amino acid, it is used as a place holder in some SEQ ID NO.'s to indicate 5-aminopentanoic acid bonded to the adjacent or underlying amino acid for improved stability. X₁₄ is a variable selected from any of X₁, X₂, X₃, X₄, X₅, X₆, X₇, X₈, X₉, or X₁₀.

TABLE 2

| Variable | Amino Acid | Chemical or Structural Feature |
|---|---|---|
| X₁ | A and G | Aliphatic, non polar |
| X₂ | D and E for acidic amino acids | Polar acidic, H-bonding, Charged |
| | | at Neutral pH Negative, Ionizable |
| X₃ | I, L or V | Non-polar, branched, non-cyclic |
| | | alkyl hydrocarbon |
| X₄ | K, R or H for basic amino acids | Polar basic/hydrophilic, H- |
| | | bonding, Ionizable |
| X₅ | C or S | Polar charged with similar |
| | | features as described in U.S. Pat. No. |
| | | 5,019,384 |
| X₆ | F, W or Y for aromatic amino acids | Non-polar/hydrophobic, |
| | | Aromatic |
| X₇ | F or P | Non-polar/hydrophobic, Ring |
| | | Structure* |
| X₈ | M or Nle (Norleucine)^{ψ} | Natural and non-natural branched |
| | | chain |
| X₉ | N or Q for amidated amino acids | Polar/hydrophilic, H-bonding, |
| | | Equivalent sized, acid carboxylic |
| | | acid group |
| X₁₀ | T or S | Polar/hydrophilic, H-bonding, |
| | | Capable of binding non-amino |
| | | acid molecules to protein |
| X₁₁ | Gaba^{χ} for X₂ X₃ or X₃ X₂ or | Amino function is on γ carbon |
| | X₂ X₃ or X₃ X₂ or X₃ X₃ or | and not α carbon |
| | X₂ X₂ | |
| X₁₂ | Acetyl or propionyl group, | Improved stability |
| | D glycine or D alanine, | |
| | Cyclohexylalanine at amino terminus | |
| X₁₃ | 5-aminopentanoic acid for | Improved Stability |
| | replacement of 3 or 4 amino acids | |
| | of X₂ and X₃ | |
| X₁₄ | X₁, X₂, X₃, X₄, X₅, X₆, X₇, X₈, X₉, | |
| | or X₁₀ | |
| X₁₅ | X₁X₁ or X₁X₃ or X₃X₁ or X₁X₂ | |
| | or X₂X₁ | |

*W is not added because W is less stable than F or P as described in U.S. Pat. No. 5,109,384
^{ψ}isomeric to leucine and isoleucine but not found in proteins and formed in the deamination of lysine. Also called caprine.
^{χ}Gamma amino butyric acid

[0067] The novel peptide constructs of this invention can also be used to treat autoimmune disease such as rheumatoid arthritis (RA). In this case, the peptide antigen(s) used to make the construct would be antigens with defined epitopes recognized for Human Leukocyte Antigens (HLA) genotypes associated with for example, RA, combined with a TCBL as described above to either suppress or redirect the immune response. As one of the major sources of antigenic materials causing autoimmune disease is thought to be the MHC proteins peptides from those regions, they would be likely candidates for the antigenic epitope portion. Other regions of potential usefulness include polymorphic regions of the minor histocompatability antigens.

[0068] TCBL's can be selected from, but are not restricted to the following LFA-3 or FasL described above (Lie et al., or Tomita et al., supra). Peptide G (SEQ ID NO. 15) from the MHC II molecule, or Hu IL-10 (SEQ ID NO. 28) (Gesser et al., Identification of functional domains on human interleukin 10 1997, Proc. Nat. Acad. Sci. 94:14620; Lie et al., supra and Tomita et al., supra) may be selected for redirection of immune responses.

[0069] As activated T cells normally express MHC molecules, another way of immunomodulation is to take advantage of the programmed pathway established by antigen addition. T cells which receive a signal from the TCR and the MHC I to CD-8⁺ cells undergo apoptosis without other costimulatory signals (Sambhara et al., supra 1991, Science, 252:1424). Therefore, the TCBL, peptide E, (the α3 domain amino acids 223-229 of the human MHC I conserved region can be used along with the autoimmune epitope to form a peptide construct according to another embodiment of this invention.

[0070] The peptide constructs of this invention may be used as or in vaccines as therapeutic agents for treatment of autoimmune disease, such as RA. The vaccines will be administered often but not always with an adjuvant and on a regular regimen such as weekly, biweekly, monthly, quarterly, semi-annually or annually by one of the following routes, ID, IM or Sub-cu and perhaps also as a cutaneous transdermal or nasal delivery vehicle in amounts of from 1-100, usually 10-50, micrograms per kilogram of body weight.

[0071] If a binding site is known on the target T cell with a defined amino acid sequence and the TCBL amino acid sequence on the ligand is not known then determination of the DNA encoding for the peptide would allow for determination of the cDNA and thus the complementary peptide sequence using the technique of Lie et al., supra, for example. In general, the TCBL's (P₂) used to form the peptide constructs of this invention will be selected from those for normal induction and modulation of immune responses, including those selected to effect redirection from Th1 or Th2, including, for example, those that are known to be related and involved in the normal events of activation, namely, IL-2, IL-10, IL-12, IL-4, IL-1β 163-171 (VQGEESNDK (SEQ ID NO. 13)) (e.g., Bajpai et al., Immunomodulating activity of analogs of noninflammatory fragment 163-171 of human interleukin-1beta 1998 Immunopharmacology, 38:237; Beckers et al., Increasing the immunogenicity of protein antigens through the genetic insertion of VQGEESNDK sequence of human IL-1 beta into their sequence 1993, J. Immunol., 151:1757; Fresca et al., In vivo restoration of T cell functions by human IL-1 beta or its 163-171 nonapeptide in immunodepressed mice 1988, J. Immunol., 141:2651; Antoni, et al., A short synthetic peptide fragment of human interleukin 1 with immunostimulatory but not inflammatory activity 1986, J. Immunol, 137:3201) and most likely derived from the final complexes (MHC-I or II and CD8 or CD4) TCR and antigenic peptide. Examples of TCBL's that are associated with earlier activation events, include for example, Fas and FasL, TNF-α and TNF-αR and those for formation of early intermediate complexes and LFA-3 and CD2.

[0072] Examples of antigens associated with autoimmune disease include, for example, those mentioned above, including the background discussion and those shown in the following, non-limiting, representative examples, as well as in the literature references cited herein, the disclosures of which are incorporated herein, in their entirety, by reference thereto. Additional examples, may also be found in the following literature (de Lalla et al., Cutting Edge: Identification of Novel T Cell Epitopes in Lol p5a by Computational Prediction 1999, J. Immunol., 163:1725 (Lol p5a allergen from rye grass); Gautam et al., supra 1998, J. Immunol., 161:60); as well as many others available to one of ordinary skill in the art.

### Introduction

[0073] The collagen induced arthritis (CIA) mouse model effectively mimics human disease to allow testing and development of rheumatoid arthritis (RA) therapies. A Ligand Epitope Antigen Presentation System (L.E.A.P.S.) peptide hetero-conjugate vaccine has been developed and evaluated that contains as one component an epitope of human Collagen type II, and it has been determined in the CIA model that this vaccine is capable of limiting disease progression, as demonstrated by pathology, histopathology and arthritis index score. L.E.A.P.S. technology converts a small peptide containing a disease specific epitope into an immunogen by attaching it a T cell binding peptide (TCBL) and presenting it to an immune cell. In this case, a peptide from human β2 microglobulin (J) is used as a TCBL. The antigen is also called an immunogen and it is able to induce an immune response wherein antigen can be used inter-changeably with immunogen However, small antigens sometimes referred and better described as epitopes are unable to induce an immune response without being made larger, or having other properties changed to make them into immunogens e.g., by adding a TCBL.

[0074] The L.E.A.P.S. technology elicits a defined immune response to a specific immunogen directing in the desired targeted direction and for the appropriate immunomodulation. Based on the data collected, to date, it is postulated that CEL-2000, which is peptide J combined with the human type II collagen peptide 254-273 and not gB, ICP27 of gD (all from HSV 1), is a successful candidate as a therapeutic vaccine for RA.

### Background

[0075] The need for new treatments for rheumatoid arthritis (RA) using therapeutic vaccines is highlighted by its inclusion in the Institute of Medicine (IOM) “Vaccines for the 21st Century”. The IOM lists RA in the top category of the 28 potentially new vaccines evaluated. Seven (7) vaccines were in this top category, “Level I Most Favorable Saves most Money & Quality Adjusted Life Year's (QALY)” including besides RA, vaccines for multiple sclerosis, insulin dependent diabetes, cytomegalo and influenza viruses, Group B streptococcus and Streptococcus pneumomniae.

[0076] Efforts to develop vaccines for RA and evaluate them in animal models of human disease have shown promise, but to date these efforts have met with only limited success. Obstacles that have stood in the way of development of a successful RA vaccine include: 1) identification of the epitope or epitopes to elicit a protective therapeutic response, 2) selection of an appropriate delivery technology and 3) demonstration of an appropriate therapeutic response in different models of the same disease. A specific targeted antigen, preferably a peptide that acts the same in humans and an appropriate animal model with disease symptoms and pathology similar, if not identical to those seen in humans, are both important issues to consider when developing a vaccine for an autoimmune condition. The antigen issue is achieved, in part, based on findings that collagen Type II from at least 2 species (chicken and bovine) can induce arthritis in mice and rats, and in the case of human collagen Type II, or peptides thereof, can be recognized by cells or antibodies from RA patients, CIA induced rodents or both. The choice of the appropriate immunogen to specifically modulate an autoimmune response is critical to the success of a therapeutic vaccine. Several protein epitopes from collagen type II have been identified as relevant for consideration as the appropriate immunogen for an RA vaccine. In addition, antibodies to citrullated peptides have been identified in RA and RA is known to be associated with a PAD gene defect, the enzyme responsible for citrullation (i.e. post-translational conversion of an adrgine residue in a protein into a citrulline residue). Another prime feature has been to identify a peptide(s) for use with the L.E.A.P.S. that has generated positive interest for human, mouse, and rat systems and is evaluable by cellular and serological studies. Human collagen type II, within residues 235-280 and more specifically between 254 to 273, is the peptide which best fits overall these criteria and is close in sequence to the peptides from bovine and chicken collagen Type II which is used to induce disease in mice. Incorporation of this collagen Type II peptide agrees with Sette et al.'s recent findings of using peptides that contained overlapping CD4 and B cell epitopes in his system for optimal activity. Sette, A., M. Moutaftsi, J. Moyron-Quiroz, M. M. McCausland, D. H. Davies, R. J. Johnston, B. Peters, B. M. Rafii-El-Idrissi, J. Hoffmann, H. P. Su, K. Singh, D. N. Garboczi, S. Head, H. Grey, P. L. Felgner, and S. Crotty. 2008. Selective CD4+ T cell help for antibody responses to a large viral pathogen: deterministic linkage of specificities. Immunity Vol. 28:847-858. Known work has used peptides that contained overlapping B cell, CD4 as well as CD8 epitopes.

[0077] Preliminary studies indicate that the L.E.A.P.S. technology is an appropriate technology to deliver a human collagen type II epitope as a therapeutic vaccine in a murine CIA model of RA. The L.E.A.P.S. technology has been used successfully to elicit beneficial immune responses in actual disease-challenge models and in several different strains of mice differing in their MHC backgrounds. These include: A) Th1 and DTH responses to an HIV epitope, HGP30, in BALB/c mice, B) protective immune responses against herpes simplex virus (HSV-1) challenge of Balb/C, C3H, A/J and C57BL6 mice as a prophylactic vaccine and C) immune response modulation resulting in useful therapeutic effects when used as a vaccine for experimental autoimmune myocarditis (EAM) model in A/J mice and in the CIA model of RA in DBA/1J mice. Although the L.E.A.P.S. technology has not been evaluated with human cells or as yet in clinical studies, there have been more animal protection efficacy studies with the L.E.A.P.S. than the Padre™ and Ii-Key™ technologies. The demonstrated efficacy of L.E.A.P.S. vaccines in mice with different MHC backgrounds suggest that CEL-2000, will most likely also be effective in man.

[0078] Several rodent and rabbit models of RA which are currently used to test RA therapies, are also suitable for testing RA vaccines and are readily available for evaluation. Arthritis can be induced in mice as well as in rats by immunization with chicken or bovine collagen Type II in combination with appropriate adjuvants or by adjuvant alone, in which case the condition is referred to as adjuvant induced arthritis (AIA) instead of CIA, to closely mimic acute or chronic rheumatoid arthritis in joint pathology, inflammation, bone erosion and remodeling, cartilage alterations and pannus changes. A type of arthritis can also be induced in the rabbit with ovalbumen.

[0079] A therapeutic vaccine has several advantages over the current immunosuppressive therapies used to treat RA. Unlike anti-cytokine therapies, the vaccine develops a targeted, specific modulation of the pathogenic immune response. The targeted nature of the immunization should minimize the side effects and risks of infection that can occur from current cytokine antagonist therapy. Current therapies are passive in nature, involve larger amounts of materials must be given frequently often in a clinic or hospital setting and are prone to be immunogenic after prolonged use and generate immune responses to the therapeutic agent especially if not of human origin or humanized which can neutralize the therapeutic agent. In contrast, a limited number of immunizations with a vaccine should be required to halt and prevent or possibly reverse the progression of RA.

[0080] A therapeutic vaccine for RA will be different from the classical anti-infection vaccines since it will be administered during the course of the disease, after disease signs can be diagnosed. The challenge will be to provide therapy as late as possible after initiation of the disease process and appearance of clinical symptoms.

[0081] Prior studies on L.E.A.P.S. vaccines for infectious diseases L.E.A.P.S. prophylactic vaccinations are mentioned. In theses studies, the vaccine as with CEL-2000 utilizes the “J” T or Immune cell binding ligand (T/ICBL), a peptide derived from human β2 microglobulin, to convert a peptide from a pathogen into a therapeutic vaccine. Rosenthal, K. S., H. Mao, W. T. Home and D. H. Zimmerman (1999), “Immunization with a L.E.A.P.S. Heteroconjugate Vaccine Containing a CTL epitope and a Peptide from Beta-2-Microglobulin Elicits a Protective and DTH Response to Herpes Simplex Virus Type 1”, Vaccine 17: 535-542; N. Goel, D. H. Zimmerman and K. S. Rosenthal 2003, “A L.E.A.P.S.™ Heteroconjugate Vaccine Containing a T Cell Epitope From HSV-1 Glycoprotein D Elicits Th1 Responses and Protection”, Vaccine 21:4410-4420; Zimmerman, D and Rosenthal, K 2005, “The L.E.A.P.S. Approach to Vaccine Development”, Frontiers in Bioscience 10:790-798; Goel, N, Zimmerman, D and Rosenthal, K 2005, “Ligand Epitope Antigen Presentation System Vaccines Against Herpes Simplex Virus”, Frontiers in Bioscience 10:966-974. It has been demonstrated in several different systems that vaccines with the J-ICBL promote Th1 responses. Such responses are sufficient for protection from herpes simplex virus type 1 (HSV-1) disease. Protection was elicited by incorporation of 3 different HSV1 peptides from either gB, gD or ICP 27 proteins into J-L.E.A.P.S. vaccines. Ablation of CD4 and CD8 cells and IFN-γ prevented establishment of the immune response during the inductive phase but, only CD4 cells and IFN-γ were essential for delivery of the protection if ablation was done after immunization but just prior to challenge. Similar findings were seen for a DTH challenge in the Balb/C mice with a different conjugate. The protection in all cases were immunogen specific and required covalent linkage of the immunogenic peptide to the J peptide, since free HSV peptide or the HSV-1 peptide coupled with another peptide were not protective. Furthermore, immunization with the J peptide or J-linked vaccines did not elicit antibody responses unless the vaccines were followed by a boost challenge with the specific antigen or HSV-1.

[0082] Another prior study on L.E.A.P.S. vaccines is for EAM model L.E.A.P.S. therapeutic vaccination. Cihakova D, J G Barin, M Kimura, G C Baldeviano, M V Talor, D H Zimmerman, E Talor, N R Rose, 2008, “Conjugated Peptide Ligand is Able to Prevent and Treat Experimental Autoimmune Myocarditis, is a Strong Stimulator of Cell and Humoral Immunity”, Int J Immunopharmacol 8:624-633. Similar to CEL-2000, immunization of A/J mice with a L.E.A.P.S. heteroconjugate having the pathogenic My-1 peptide from murine cardiac myosin linked to “J” conferred both protection and treatment against experimental autoimmune myocarditis (EAM). These findings were for a L.E.A.P.S. vaccine protecting against EAM, a condition induced in A/J mice with the My-1 peptide from murine cardiac myosin. While the J-My-1 vaccine was not evaluated with other models this condition can be induced by coxsackie virus B3 infection as well as immunization with murine cardiac myosin (MCM) 1. Therapies for EAM induced by My-1 such as monoclonal antibodies (for TNF-α or IL-1β), anti-complement receptor, cobra venom or recombinant proteins such as IFN-γ are effective only if given in the first week, during the induction phase but are ineffective when given by day 10 or later.

[0083] One possible conclusion is that the L.E.A.P.S. vaccine J-My1 was antigen specific (for My-1), did not induce a general anergy as for the anti PPD response, had little effect on antibody to My-1, reduced proliferative responses to My-1 and did this without acting as a general mitogen or polyclonal activator. Expanded numbers of activated CD69+ and CD44+ CD4+ and CD8+ cells, as well as increased CD11c+ DCs were observed in the spleens. No differences in CD4+ CD25+ FoxP3+ Treg cell numbers were detected in the spleen or the target heart organ. Examination of the chemokine and cytokine response with the Quantikine ELISA kits for IFN-γ, TGF-13, TNF-α, IL-1α, IL4, IL10, IL2, Histamine, IP-10, MIP-1α of sera and spleens were unremarkable, however cardiac tissue showed a significant decrease in MIP-1α and IP10. This is in contrast to the elevated levels of these molecules in another EAM model and the ability of monoclonal antibody ablation to MIP-1α or MCP-1 to reduce disease severity. Although IL-17 may be involved, it was not studied as reagents were not available.

[0084] Unfortunately, fewer doses or less vaccine than the 100 nmol per dose used every 7 days were not tested in this EAM study (3 times more in amount and frequency was used than in our previous HSV vaccine studies which used only 2 doses of 33 nmol peptide). Individual, unrepresentative mice exhibited anaphylaxis to the vaccine regimen. Based on studies, it is believed these adverse events will not be observed in older animals as in the CIA model or can be circumvented by using altered dosing (amounts and timing), drug prophylaxis or altered peptide ligands (APLs).

[0085] The following five studies are of CEL-2000 therapeutic vaccine for collagen induced arthritis (CIA) where the first step was to identify a good animal model for testing the vaccine, which is the collagen induced arthritis (CIA) model in young (6-7) week old male DBA/1J mice. These mice received 2 injections of bovine collagen the first in complete Freund's adjuvant (CFA) on day 0 and then 3 weeks later on day 21, in Incomplete CFA. After the second collagen injection, the mice were evaluated daily for any joint swelling or redness. Each of the paws was scored on a 4 point scale (Arthritis Index (AI)) with respect to the number of digits with symptoms and the thickness of the paw measured, at least 3-4 times a week. Each mouse was weighed weekly.

[0086] The first study is the CIA model CEL-2000 therapeutic vaccination conjugate specificity effect on AI scores (study 4.1 see FIG. 1 and legend). When significant disease is noted, usually about day 28, the mice are grouped (n=8) with a range of scores between 1 and 6 and group mean of 2.5 to 3. At this point the therapy begins according to protocol. Controls include groups with induced disease but no therapy and groups of healthy mice without induced disease. A therapy control of Enbrel (3 mg/kG daily) was included. In this study (FIG. 1), mice received two treatments of 33 nmoles (for CEL-2000 equivalent to 4.8 mg/kG) of CEL-2000, (the same dose as used for the L.E.A.P.S. HSV vaccines), or other conjugates of the same collagen peptide used in CEL-2000 using the same ICBLs as in the HSV or EAM systems for comparison using a GMP grade ICFA adjuvant.

[0087] Shown is group average AI score+/−sd for controls (No Disease) induced squares bottom flat line curve, (Disease induced no Treatment [Upper diamond]), disease induced Enbrel given every day [open right side up triangle] and 3 vaccine groups (CEL-2000 [big X], CEL-2001, where CEL-2001 is the core collagen type II peptide huCII₃₅₄₋₃₇₃, and CEL-2002 is the huCII₃₅₄₋₃₇₃ conjugated to CEL-1000 derG see CS112 114 or 118 [open circles] (CII peptide alone [upside triangle]) treatment groups.

[0088] CEL-2000 treatment limited the progression of disease, as indicated by AI scores, which were reduced to a greater extent than was seen with other conjugates, CEL-2001 or CEL-2002, in the same rank order as seen for similar L.E.A.P.S. conjugates in the EAM or HSV systems. AI scores are evaluations on a scale of 0=normal to 4=maximal effect of joint thickening, redness, immobilization of joints in a digit or total paw for each of the 4 paws in the CIA mouse model of rheumatoid arthritis. Enbrel treatment given on a daily basis for the first 14 days was slightly more effective than the vaccine as this dose and timing. This suggests a larger dose of CEL-2000 might be more effective.

[0089] The second study is for the CIA model CEL-2000 therapeutic vaccination conjugate dose amount and timing effect on AI scores (study 4.2 see FIG. 2 and legend).

[0090] The ability of the CEL-2000 also referred to as J-huICBL (SEQ ID NO 852) to modulate immune responses to promote protective, preventative and therapeutic immune responses prompted its further evaluation in the application to therapy for CIA.

[0091] We next investigated the amount as used in study 1 (see study 4.1) or in the EAM study (see study 3.2) and on a 7 or 14 day immunization schedule.

[0092] Treatment started when group score was 3.5. This was done to have all groups starting with same score, as opposed to the range between 2.5 and 3.5 seen in the first study. The same dose of Enbrel as was used in the first study but was given every other day for the entire study period of 28 days.

[0093] CEL-2000 treatment limited the progression of disease, as indicated by reduced AI scores. Joint thickening, redness, immobilization of joints in a digit or total paw as measured for each of the 4 paws in the CIA mouse model of rheumatoid arthritis was reduced.

[0094] The outcomes of different CEL-2000 treatment schedules were compared with Enbrel. In this study, CEL-2000 treatment with 2 doses of 33 or 100 nmol (the dose used in the EAM study) given subcutaneously on days 0 and 7 as in the EAM study or 0 and 14 as for the HSV. Most regimes reduced the progression of arthritis disease to levels that were at least as good as those of mice treated with Enbrel (every other day for the 28 days of the study). Immunization of mice with the 100 nmol dose (3× treatment) on days 0 and 7 appeared to limit the progression of disease throughout the experimental period as shown in FIG. 2. The CEL-2003 links the corresponding murine CII254-273 sequence DAGEPGIAGFKGDQGPKGET (SEQ ID NO. 879) to the J ICBL. This trial suggests that the dosage and schedule of administration (time between initial and second immunization) are important parameters for CEL-2000 treatment. Use of a student “t” Test analysis of Treatment groups at day 7 days 14 and 21 to calculate the p value showed the 3× dose of CEL-2000 on day 0 and 14 followed by 3× on day 0 and 7 or 1× on day 0 and 7 is equivalent to 0 and 14 and slightly better than Enbrel every other day for all 28 days.

[0095] The third study is for CIA model analysis of foot pad thickness as evidence of CEL-2000 therapeutic vaccine efficacy (study 4.3 see FIG. 3 and legend). Measurement of the footpad thickness of the mice for the first two weeks of vaccine therapy was compared to Enbrel therapy as a more independent and completely objective measurement of the vaccine's effect. Swelling was reduced within approximately 3 weeks with or without any intervention. A representative set of data (FIG. 3) are shown.

[0096] As a general rule the therapies at either dose of vaccine or Enbrel are comparable. They do not restore the thickness to the no disease condition, but offer substantial benefit in reducing swelling.

[0097] The fourth study is for the CIA model CEL-2000 therapeutic vaccination; histopathology (study 4.4 see FIG. 4 and legend). At the termination of the experiments the animals were euthanized, the right rear feet were collected and stored individually in buffered formalin to be fixed in preparation for paraffin embedding, sectioning, staining and analysis. The feet in buffered formalin were sent for processing, reading and plotting of the data (representative sections from mid group specimens were photographed).

[0098] The pathologists scored the feet for disease pathology in 4 areas: inflammation, pannus, cartilage and bone. FIG. 4 is a summary plot of the analysis performed cores of the 4 areas from the following groups: Control no disease; CIA disease: CIA Disease Enbrel daily for 14 days continued for 2 more weeks before termination: CEL-2000 and CEL-2001 groups (vaccinated on day 0 and 7) from study 1 (FIG. 1) and from study 2 (FIG. 2) 1× and 3× CEL-2000 vaccinated groups on day 0 and 7.

[0099] Findings: Normal Mouse hind paw and ankle from normal control animal are normal. CIA Disease mouse-hind paw and ankle from disease control animal have marked inflammation and moderate cartilage damage with mild pannus and bone resorption in the ankle and most digit joints. For CIA treated with Enbrel for 14 days hind paw and ankle from arthritic animal have mild inflammation and cartilage damage with minimal pannus and bone resorption in some digit joints. CIA plus CEL-2000 100 nmol on days 0 and 7—hind paw and ankle from arthritic animal treated with 3×CEL-2000 on days 0 and 7 have mild inflammation and minimal cartilage damage with minimal pannus and less bone resorption in fewer digit joints.

[0100] As is seen in FIG. 4, clearly the best protected group (least diseased) by all 4 criteria was the 3×CEL-2000 vaccinated mice on days 0 and 7. Clearly, 14 days after cessation of therapy with Enbrel, the mice had developed significant disease to levels that were not statistically different from untreated CIA mice, while the 3×CEL-2000 group even 3 weeks after immunization statistically had less disease pathology.

[0101] Hence, 2 vaccinations with CEL-2000 at 100 nmol provided more lasting effect than the multiple Enbrel treatments during the 28 day period. Still to be determined is the dose amount, frequency and timing of CEL-2000 beyond 28 days.

[0102] The fifth study is for the CIA-model CEL-2000 vaccination serum antibodies (study 4.5). Antibody production to the vaccine peptides, collagen or citrulline or components used to make vaccines were evaluated in mouse sera from the previous two sets of studies. As expected, all sera recognized the bovine collagen molecule used to induce the disease. Neither the dose, amount of vaccine, nor timing of vaccination seemed to affect the titer or isotype. These results are not surprising. No antibodies were detected with reactivity to the citrulline using a citrulline fibrin peptide substrate in the ELISA. Although some antibodies bound to the vaccine peptides, it did not seem as if specific antibodies were generated against the “J” T/ICBL but only to the collagen peptide portion. The CIA control and CIA plus Enbrel sera did not have any antibodies to the CEL-2000 vaccine components, although by 14 days after start of Enbrel therapy antibodies could be detected to Enbrel. (data not shown)

### L.E.A.P.S. Conjugates Serum Cytokine Studies

[0103] As shown EAM and FIGS. 1-4 for CIA, L.E.A.P.S. vaccines are effective therapeutic vaccines and based on other data the action does not appear to involve antibodies. Examination of sera of other mice that received vaccines with the same “J” immune cell binding ligand (ICBL) as for CEL-2000, elicit a spectrum of cytokines including most notably IL12 within 3 days (well before any circulating antibodies) which progresses to include notably IFN-γ within 10 days.

[0104] The outcome of the immune response to vaccines is likely at least in part determined by the cytokines elicited by the immunization. Cytokines elicited by immunization of A/J mice with either the J, JgD or JH peptides emulsified in Seppic ISA51 were evaluated from serum obtained on days 3, 10 and 24 after immunization using Ray Biotech protein microarrays. Interestingly, the cytokine profiles of serum obtained from mice immunized with either the JgD or the JH vaccines contained very similar results which were different from the adjuvant alone or the unmodified J ICBL vaccinated control mice. By the third day after immunization, there were increases in IL12p70, RANTES, GMCSF, MCP5, MCP1, IL9, and IL17 but not TNF-α levels. The response progressed towards expression of IFN-γ by day 10 and 24 with continued IL12, RANTES, MCP5, IL9 production and increases in IL2, and IFN-γ production with a spike of IL17 on day 10. IL12 is produced by DCs and macrophages and promotes the development of Th1 responses which are characterized by production of IL2 and IFN-γ. These results indicate a progression from a DC1 (DC mediated response) to a Th1 type of response but the progression lacks the induction of the acute phase cytokines ILL TNF-α and IL6 that would accompany a TLR activation of DC1 cells. The most remarkable change in cytokine levels upon immunization with the unmodified J ICBL was a reduction in IL10 levels, an effect that would also support a Th1 response.

### L.E.A.P.S. Conjugates Ex Vivo Studies

[0105] A major goal of the L.E.A.P.S. vaccines has been to establish an ex vivo tissue culture system to study the effects and optimize the structure of the vaccines. It has been realized after many attempts with murine spleen cells, that these spleen cells are down regulated and or respond poorly to J-L.E.A.P.S. vaccines in tissue culture. Recent ex vivo studies with bone marrow cells indicate that two different J-L.E.A.P.S. vaccines (JH and JgD) can initiate and direct the nature of the subsequent immune response by production of IL12 but not TNF-α. It is the type of response that would counteract an antibody initiated hypersensitivity such as RA without exacerbating the condition by also stimulation production of TNF-α.

### Examples for CEL-2000:

[0106] Studies can determine whether the vaccine can stop arrest and or reverse the RA disease process once initiated whether bystander or epitope spreading is a key element or process behind the mechanism of action, the role of CD4CD25 Treg & IL17 in the vaccine's action, if CEL-2000 is also effective as a therapeutic vaccine in other species and models of arthritis, such as the CIA and AIA models in rats and mice. Develop adequate manufacturing source for having a sufficient reproducible supply of High Quality CEL-2000 peptide and standards for analytical assay development, formulation, stability studies and material available for animal safety/toxicity studies and phase I clinical studies. Conducting animal safety/toxicology studies necessary for IND filing and conducting phase I studies for CEL-2000 as a therapeutic peptide vaccine for rheumatoid arthritis. As a prelude to Phase 1 clinical trials, the effects of CEL-2000 should be evaluated on purified human dendritic cells (DCs). Differences in the nature of the mouse and human immune responses, especially DCs, can influence the outcomes of vaccine administration. The ability of CEL-2000 to elicit a response and cause the secretion of relevant cytokines in ex vivo studies of murine and human cells would provide the means to standardize treatment, evaluate some parameters of toxicity and help to define the mechanism of action of CEL-2000.

### P1 for Rheumatoid Arthritis

[0107] One antigen with defined epitopes recognized for rheumatoid arthritis (RA) is collagen type II including the peptide from position 254-273, (Krco et al., “Characterization of the antigenic structure of human type II collagen”, J Immunol, 1996 Apr. 15; 156 (8):2761-8; Myers et al., “Characterization of a tolerogenic T cell epitope of type II collagen and its relevance to collagen-induced arthritis”, J. Immunol., 1992 Aug. 15; 149 (4):1439-43; Baldwin et al., “Structure of cDNA clones coding for human type II procollagen. The alpha 1(II) chain is more similar to the alpha 1(I) chain than two other alpha chains of fibrillar collagens”, Biochem J. 1989 Sep. 1; 262 (2):521-8).

[0108] For example, the collagen type II 254-273 is shown below.

| | |
|---|---|
| TGGKPGIAGFKGEQGPKGEP | (SEQ ID NO. 836) |

[0109] The improved variants of collagen type II 254-273 are as follows.

(SEQ ID NO. 837)
X₁₀X₁X₁X₄X₇X₁X₃X₁X₁X₆X₄X₁X₂X₉X₁X₇X₄X₁X₂X₇
or
(SEQ ID NO. 838)
X₁₀X₁₅X₄X₇X₁₁X₁₅X₆X₄X₁₅X₉X₁X₇X₄X₁₅X₇

[0110] Other various antigens often with defined epitopes recognized for rheumatoid arthritis (RA) are collagen type II 390-402.

[0111] For example, the collagen type II 390-402 as previously described as SEQ ID NO. 1 is shown below.

| | |
|---|---|
| IAGFKGEQGPKGE | (SEQ ID NO. 1) |

[0112] The improved variants of collagen type II 390-402 are as follows.

| X₃X₁X₁X₆X₄X₁X₂X₉X₁X₇X₄X₁X₂ | |
|---|---|
| or | |
| X₁₂X₃X₁X₁X₆X₄X₁X₂X₉X₁X₇X₄X₁X₂ | (SEQ ID NO. 108) |

[0113] Peptides from Type II human collagen (Krco et al. (1999 Identification of T cell determinants on human type II collagen recognized by HLA-DQ8 and HLA-DQ6 transgenic mice. J Immunol. 163 (3):1661-5) referred therein as Peptide G 54-73 is shown by the SEQ ID NO. 487.

| | |
|---|---|
| DGEAGKPGKAGERGPPGPQG | (SEQ ID NO. 487) |

[0114] The improved variants from Type II human collagen are as follows.

(SEQ ID NO. 488)
X₂X₁X₂X₁X₁X₄X₇X₁X₄X₁X₁X₂X₄X₁X₇X₇X₁X₇X₉X₁
or
(SEQ ID NO. 489)
X₁₂X₂X₁X₂X₁X₁X₄X₇X₁X₄X₁X₁X₂X₄X₁X₇X₇X₁X₇X₉X₁

[0115] Peptide K at positions 94-113 is shown by SEQ ID NO. 490 (Krco et al., id.).

| | |
|---|---|
| GLDGAKGEAGAPGVKGESGS | (SEQ ID NO. 490) |

[0116] The improved variants of Peptide K at positions 94-113 SEQ ID NO. 490 are shown as follows.

(SEQ ID NO. 491)
X₁X₃X₂X₁X₁X₄X₁X₂X₁X₁X₁X₇X₁X₃X₄X₁X₂X₁₀X₁X₁₀
or
(SEQ ID NO. 492)
X₁₂X₁X₃X₂X₁X₁X₄X₁X₂X₁X₁X₁X₇X₁X₃X₄X₁X₂X₁₀X₁X₁₀
or
(SEQ ID NO. 493)
X₁X₁₁X₁X₁X₄X₁X₂X₁X₁X₁X₇X₁X₃X₄X₁X₂X₁₀X₁X₁₀
or
(SEQ ID NO. 494)
X₁₂X₁X₁₁X₁X₁X₄X₁X₂X₁X₁X₁X₇X₁X₃X₄X₁X₂X₁₀X₁X₁₀

[0117] Peptide 44 at positions 554-573 is shown by SEQ ID NO. 495 (Krco et al., id.).

| | |
|---|---|
| FERGAAGIAGDKGDRGDVGEK | (SEQ ID NO. 495) |

[0118] The improved variants of Peptide 44 at positions 554-573 of SEQ ID NO. 495 are shown as follows.

(SEQ ID NO. 496)
X₂X₄X₁X₁X₁X₁X₃X₁X₁X₂X₄X₁X₂X₄X₁X₂X₃X₁X₂ X₄
or
(SEQ ID NO. 497)
X₁₂X₂X₄X₁X₁X₁X₁X₃X₁X₁X₂X₄X₁X₂X₄X₁X₂X₃X₁X₂ X₄
or
(SEQ ID NO. 498)
X₂X₄X₁X₁X₁X₁X₃X₁X₁X₂X₄X₁X₂X₄X₁X₁₁X₁X₂ X₄
or
(SEQ ID NO. 499)
X₁₂X₂X₄X₁X₁X₁X₁X₃X₁X₁X₂X₄X₁X₂X₄X₁X₁₁X₁X₂ X₄

[0119] The protein Osteopontin (OPN) contains a peptide referred shown by the SEQ ID NO. 500 (Yamamoto et al., (2003) Essential role of the cryptic epitope SLAYGLR within osteopontin in a murine model of rheumatoid arthritis. J. Clin. Invest. 112:181-188).

| | |
|---|---|
| SLAYGLR | (SEQ ID NO. 500) |

[0120] The improved variants Osteopontin (OPN) are shown as follows.

| | |
|---|---|
| X₁₀X₃X₁X₆X₁X₃X₄ | (SEQ ID NO. 501) |
| or | |
| X₁₂X₁₀X₃X₁X₆X₁X₃X₄ | (SEQ ID NO. 502) |

[0121] A peptide naJP1 is indicated by SEQ ID NO. 503 (Prakken et al. (2004), Epitope-specific immunotherapy induces immune deviation of proinflammatory T cells in rheumatoid arthritis, Proc Nat Acad Sci USA 101:4228-4233).

| | |
|---|---|
| QKRAAYKQYGHAAFE | (SEQ ID NO. 503) |

[0122] The improved variants of naJP1 are indicated by the following.

| | |
|---|---|
| X₉X₄X₄X₁X₁X₆X₄X₉X₆X₁X₄X₁X₁X₇X₂ | (SEQ ID NO. 504) |
| or | |
| X₁₂X₉X₄X₄X₁X₁X₆X₄X₉X₆X₁X₄X₁X₁X₇X₂ | (SEQ ID NO. 505) |

[0123] A peptide dnaJPv is indicated by SEQ ID NO. 506 (Prakken et al., id.).

| | |
|---|---|
| ERAAYDQYGHAAFE | (SEQ ID NO. 506) |

[0124] The improved variants of dnaJPv are indicated by the following.

| | |
|---|---|
| X₂X₄X₁X₁X₆X₂X₉X₆X₁X₄X₁X₁X₇X₂ | (SEQ ID NO. 507) |
| or | |
| X₁₂X₂X₄X₁X₁X₆X₂X₉X₆X₁X₄X₁X₁X₇X₂ | (SEQ ID NO. 508) |

### P2 or TCBL Epitopes

[0125] Type I diabetes is an autoimmune condition that most likely involves the TH1 pathway or if CTL is contemplated then the T1 pathway. Redirection of an antigen specific immune response from the TH1 to TH2 pathway may result in a non-diabetic condition.

[0126] One TCBL that is known to re-direct the TH1 to TH2 pathway is peptide “J”. The peptide “J” can be conjugated to a specific antigen wherein the conjugated construct can direct the immune response to the peptide antigen toward the TH1 pathway. One example of such a construct is the L.E.A.P.S. construct.

[0127] Similarly, the TCBL peptide “G” or the improved version “derG” can direct the immune response down the TH2 pathway. The directed response is based upon data from several systems using peptide antigens from HSV, HIV, malaria, TB and murine myosin for antigen specific induction of antibody isotypes, DTH, and cytokine secretion (IL2, IL4 and IFN-γ). The basis for the directed response is also founded on observed protection upon pathogen challenge as well as immune cell types evaluated to demonstrate effects of treatment with L.E.A.P.S. constructs.

[0128] As shown previously, one TCBL sequence contemplated in the L.E.A.P.S. construct of the present invention is the peptide “G” shown by SEQ ID NO. 15.

| | |
|---|---|
| NGQEEKAGVVSTGLIGGG | (SEQ ID NO. 15) |

[0129] The improved variants of peptide “G” are shown by SEQ ID NO. 121.

(SEQ ID NO. 121)
X₉X₁X₉X₂X₂X₄X₁X₁X₃X₃X₅X₁₀X₁X₃X₃X₁X₁X₁
or
X₁₂X₉X₁X₉X₂X₂X₄X₁X₁X₃X₃X₅X₁₀X₁X₃X₃X₁X₁X₁
or
X₁₂X₉X₁X₉X₁₁X₄X₁X₁X₁₁X₅X₁₀X₁X₁₁X₁X₁X₁

[0130] One variant of the peptide “G” is the compound known as “derG” with a triglycine spacer linked to the N terminus of the antigens having the sequence shown by SEQ ID NO. 50.

| | |
|---|---|
| DGQEEKAGVVSTGLIGGG | (SEQ ID NO. 50) |

[0131] The improved variants of the peptide “G” are shown by the following.

(SEQ ID NO. 793)
X₂X₁X₉X₂X₂X₄X₁X₁X₃X₃X₅X₁₀X₁X₃X₃X₁X₁X₁
or
X₁₂X₂X₁X₉X₂X₂X₄X₁X₁X₃X₃X₅X₁₀X₁X₃X₃X₁X₁X₁
or
(SEQ ID NO. 794)
X₁₃X₂X₁X₉X₂X₂X₄X₁X₁X₃X₃X₅X₁₀X₁X₃X₃X₁X₁X₁
(SEQ ID NO. 122 or 795)
X₁₂X₂X₁X₉X₁₁X₄X₁X₁X₁₁X₅X₁₀X₁X₁₁X₁X₁X₁

[0132] Other TCBL's and spacers are also contemplated by the invention such as ICAM-1, LFA-3 (aa26-42) as shown by SEQ ID NO. 4 (Osborn et al., supra).

| | |
|---|---|
| VLWKKQKDKVAELENSE | (SEQ ID NO. 4) |

[0133] The improved variants of ICAM-1, LFA-3 (aa26-42) are shown by SEQ ID NO. 123.

(SEQ ID NO. 123)
X₃X₃X₆X₄X₄X₉X₄X₂X₄X₃X₁X₂X₃X₂X₉X₅X₂
or
X₁₂X₃X₃X₆X₄X₄X₉X₄X₂X₄X₃X₁X₂X₃X₂X₉X₅X₂
or
X₁₂X₁₁X₆X₄X₄X₉X₄X₂X₄X₃X₁X₁₁X₉X₅X₂
or
X₁₂X₁₁X₆X₄X₄X₉X₄X₂X₄X₃X₁X₁₃X₉X₅X₂

[0134] The peptide J is shown by the SEQ ID NO. 51.

| | |
|---|---|
| DLLKNGERIEKVEGGG | (SEQ ID NO. 51) |

[0135] The improved variants of above peptide are shown by SEQ ID NO. 124.

| | |
|---|---|
| X₂X₃X₃X₄X₉X₁X₂X₄X₃X₂X₄X₃X₂ | (SEQ ID NO. 124) |
| or | |
| X₁₂X₂X₃X₃X₄X₉X₁X₂X₄X₃X₂X₄X₃X₂ | |
| or | |
| X₁₂X₁₁X₄X₉X₁X₂X₄X₁₁X₄X₁₁ | |
| or | |
| X₁₂X₁₃X₄X₉X₁X₂X₄X₁₁X₄X₁₁ | |
| or | |

[0136] The extended version of the peptide J is shown by the SEQ ID NO. 463.

| | |
|---|---|
| DLLKNGERIEKVEGGG | (SEQ ID NO. 463) |

[0137] The improved variants of above peptide are shown by SEQ ID NO. 464.

(SEQ ID NO. 464)
X₂X₃X₃X₄X₉X₁X₂X₄X₃X₂X₄X₃X₂X₁X₁X₁
or
X₁₂X₂X₃X₃X₄X₉X₁X₂X₄X₃X₂X₄X₃X₂X₁X₁X₁
or
X₁₂X₁₁X₄X₉X₁X₂X₄X₁₁X₄X₁₁X₁X₁X₁
or
X₁₂X₁₃X₄X₉X₁X₂X₄X₁₁X₄X₁₁X₁X₁X₁

[0138] Examples of TNF peptides known to activate macrophages are amino acids 70-80 as shown in SEQ ID NO. 5 (Britton et al., A Tumor Necrosis Factor Mimetic Peptide Activates a Murine Macrophage Cell Line To Inhibit Mycobacterial Growth in a Nitric Oxide-Dependent Fashion 1998, I & I, 66:2122).

| | |
|---|---|
| PSTHVLITHTI | (SEQ ID NO. 5) |

[0139] The improved variants of the above TNF peptides are shown by SEQ ID NO. 125.

| | |
|---|---|
| X₇X₅X₁₀X₄X₃X₃X₃X₁₀X₄X₁₀X₃ | (SEQ ID NO. 125) |
| or | |
| X₁₂X₇X₅X₁₀X₄X₃X₃X₃X₁₀X₄X₁₀X₃ | |
| or | |
| X₁₂X₇X₅X₁₀X₄X₁₁X₁₀X₄X₁₀X₃ | |
| or | |
| X₁₂X₇X₅X₁₀X₄X₁₃X₁₀X₄X₁₀X₃ | |

[0140] The antagonist peptide of another region of TNF peptides is shown by SEQ ID NO. 126 (Chirinos-Rojas et al., supra).

| | |
|---|---|
| DFLPHYKNTSLGHRP | (SEQ ID NO. 126) |

[0141] The improved variants of above TNF peptides are shown by SEQ ID NO. 127.

(SEQ ID NO. 127)
X₂X₆X₃X₇X₄X₆X₄X₉X₁₀X₅X₃X₁X₄X₄X₇
or
X₁₂X₂X₆X₃X₇X₄X₆X₄X₉X₁₀X₅X₃X₁X₄X₄X₇

[0142] Still further, the TCBLs contemplated by the invention can be selected from any of the sequence above but are not restricted to just the LFA-3 or FasL sequences described above (Lie et al. or Tomita et al., supra).

[0143] For example, another TCBL can be the Hu IL-10 aa₁₅₂₋₁₆₀ shown by SEQ ID NO. 18 as previously described.

| | |
|---|---|
| AYMTMKIRN | (SEQ ID NO. 18) |

[0144] The improved variants of Hu IL-10 aa₁₅₂₋₁₆₀ are shown by SEQ ID NO. 128.

| | |
|---|---|
| X₁X₆X₈X₁₀X₈X₄X₃X₄X₉ | (SEQ ID NO. 128) |
| or | |
| X₁₂X₁X₆X₈X₁₀X₈X₄X₃X₄X₉ | |

[0145] Two discontinuous epitopes of IL-10 as shown by SEQ ID NO. 129 are also contemplated by the invention for redirection of immune responses (Gesser et al., supra; Lie et al. supra and Tomita et al. supra).

| | |
|---|---|
| DNQLLETCKQDRLRNRRGNGSSTHFEGNLPC | (SEQ ID NO. 129) |

[0146] The improved variants of above peptide IL-10 as shown by SEQ ID NO. 129 are shown by SEQ ID NO. 130.

(SEQ ID NO. 130)
X₂X₉X₉X₃X₃X₂X₁₀X₅X₄X₉X₂X₄X₃X₄X₉X₄X₄X₁X₉X₁X₅X₅X₁₀X₄
X₆X₂X₁X₉X₃X₇X₅
or
X₁₂X₂X₉X₉X₃X₃X₂X₁₀X₅X₄X₉X₂X₄X₃X₄X₉X₄X₄X₁X₉X₁X₅X₅
X₁₀X₄X₆X₂X₁X₉X₃X₇X₅
or
X₁₂X₂X₉X₉X₁₁X₁₀X₅X₄X₉X₂X₄X₃X₄X₉X₄X₄X₁X₉X₁X₅X₅X₁₀X₄
X₆X₂X₁X₉X₃X₇X₅
or
X₁₂X₂X₉X₉X₁₃X₁₀X₅X₄X₉X₂X₄X₃X₄X₉X₄X₄X₁X₉X₁X₅X₅X₁₀X₄
X₆X₂X₁X₉X₃X₇X₅

[0147] Another TCBL sequence contemplated by the invention is the α3 domain amino acids 223-229 of the human MHC I TCBL peptide E with a spacer. The sequence is shown by SEQ ID NO. 21.

| | |
|---|---|
| DQTQDTEGGC | (SEQ ID NO. 21) |

[0148] The improved variants of α3 domain amino acids 223-229 are shown by SEQ ID NO. 131.

| | |
|---|---|
| X₂X₉X₁₀X₉X₂X₁₀X₂X₁X₁X₅ | (SEQ ID NO. 131) |
| or | |
| X₁₂X₂X₉X₁₀X₉X₂X₁₀X₂X₁X₁X₅ | |

[0149] The IL-1β at positions 163-171 shown by SEQ ID NO. 13 can also be used to form a peptide construct according to another embodiment of this invention (Bajpai et al., supra; Beckers et al., supra; Fresca et al., supra; Antoni et al., supra).

| | |
|---|---|
| VQGEESNDK | (SEQ ID NO. 13) |

[0150] The improved variants of IL-1β at positions 163-171 are shown by SEQ ID NO. 132.

| | |
|---|---|
| X₃X₉X₁X₂X₂X₅X₉X₂X₄ | (SEQ ID NO. 132) |
| or | |
| X₁₂X₃X₉X₁X₂X₂X₅X₉X₂X₄ | |
| or | |
| X₁₂X₃X₉X₁X₁₁X₅X₉X₂X₄ | |

[0151] However, constructs containing spacers are also contemplated in additional embodiments. For example, peptide “J” with a triglycine spacer shown by SEQ ID NO. 51 can be formed.

| | |
|---|---|
| DLLKNGERIEKVEGGG | (SEQ ID NO. 51) |

[0152] The improved variants of peptide “J” with the triglycine spacer are shown by SEQ ID NO. 133.

(SEQ ID NO. 133)
X₂X₃X₃X₄X₉X₁X₂X₄X₃X₂X₄X₃X₂X₁X₁X₁
or
X₁₂X₂X₃X₃X₄X₉X₁X₂X₄X₃X₂X₄X₃X₂X₁X₁X₁
or
X₁₂X₁₁X₄X₉X₁X₂X₄X₁₁X₄X₁₁X₁X₁X₁
or
X₁₂X₁₃X₄X₉X₁X₂X₄X₁₁X₄X₁₁X₁X₁X₁

[0153] A TCBL for the homologue of the C-terminal of human IL-10 (AYMTMKIRN), which is equivalent to SEQ ID NO. 18, is shown by SEQ ID NO. 763 (Kurte et al., “A Synthetic Peptide Homologous to Functional Domain of Human IL-10 Down-Regulates Expression of MHC Class I and Transporter Associated with Antigen Processing 1/2 in Human Melanoma Cells”, J of Immunol 2004, 173:1731-1737).

[0154] The improved variants of the TCBL for the homologue of the C-terminal of human pf IL-10 are as follows.

| | |
|---|---|
| X₁X₆X₈X₁₀X₈X₄X₃X₄X₉ | (SEQ ID NO. 764) |
| X₁₂X₁X₆X₈X₁₀X₈X₄X₃X₄X₉ | (SEQ ID NO. 765) |

### Variable Linker Sequences

[0155] The improved versions of many of the sequence of the invention can contain multiple glycines 3 to 6 glycines in length. In particular, carbodiimides are commonly used to modify proteins on their carboxylate groups. They react with proteins at about pH of 5 to 6 and can be used either alone or in combination with amines to create new amide bonds off the carboxyl. The reaction producing various new adducts are well known within the art.

[0156] For example, a triglycine with or without one or two serines to separate two portions of the conjugate can be made by carbidiimide modification. The triglycine with a single serine is shown by the SEQ ID NO. 7.

| | |
|---|---|
| GGGS | (SEQ ID NO. 7) |

[0157] The improved variants of the triglycine with a single serine are shown by SEQ ID NO. 134.

| | |
|---|---|
| X₁X₁X₁X₅ | (SEQ ID NO. 134) |
| or | |
| X₁₂X₁X₁X₁X₅ | |

[0158] For a triglycine with two serines, the spacer is shown by SEQ ID NO. 8.

| | |
|---|---|
| GGGSS | (SEQ ID NO. 8) |

[0159] The improved variants of triglycine with two serines are shown by SEQ ID NO. 135.

| X₁X₁X₁X₅X₅ | (SEQ ID NO. 135) |
|---|---|
| or | |
| X₁₂X₁X₁X₁X₅X₅ | |

[0160] For four glycines with a single serine, the spacer is shown by SEQ ID NO. 9.

| | |
|---|---|
| GGGGS | (SEQ ID NO. 9) |

[0161] The improved variants of four glycines with a single serine are shown by SEQ ID NO. 136.

| | |
|---|---|
| X₁X₁X₁X₁X₅ | (SEQ ID NO. 136) |
| or | |
| X₁₂X₁X₁X₁X₁X₅ | |

[0162] An example of four glycines with a two serines is shown by the SEQ ID NO. 10.

| | |
|---|---|
| GGGGSS | (SEQ ID NO. 10) |

[0163] The improved variants of four glycines with a two serines are shown by SEQ ID NO. 137.

| | |
|---|---|
| X₁X₁X₁X₁X₅ | (SEQ ID NO. 137) |
| or | |
| X₁₂X₁X₁X₁X₁X₅ | |

[0164] An example of a spacer having three glycines interspaced with a single serine followed by three glycines and a serine is shown by the SEQ ID NO. 11.

| | |
|---|---|
| GGGSGGGS | (SEQ ID NO. 11) |

[0165] The improved variants of a spacer having three glycines interspaced with a single serine followed by three glycines and a serine are shown by SEQ ID NO. 138.

| | |
|---|---|
| X₁X₁X₁X₅X₁X₁X₁X₅ | (SEQ ID NO. 138) |
| or | |
| X₁₂X₁X₁X₁X₅X₁X₁X₁X₅ | |

[0166] Other conventional linkages contemplated by the invention are direct linkages taught by the aforementioned U.S. Pat. No. 5,652,342. Examples of bifunctional linkers which can be employed in the present invention to covalently link the T cell specific binding ligand and antigen associated with disease or a causative agent of disease, or epitope thereof include N-succinimidyl-3-(2-pyridyldthio)propinate (hereinafter “SPDP”) (Pharmacia, Piscataway, N.J.), which activates and allows formation of a bridge between two sulfhydryl groups of cysteines or a bridge between a derivatized (propinated-thiolyated) primary amino group and a cysteine; m-maleimidobenzoyl-N-hydroxy-succimide ester (hereinafter “MBS”) (Pierce Chemical, Rockford, Ill.), which activates an amino group and then couples by a sulfhydryl group to a cysteine sulfydryl so as to form a disulfide bond between the two polypeptides; and 1-ethyl-3-(3-dimethylaminopropyl)carbodiimide (hereinafter “EDC”) (Pierce Chemical, Rockford, Ill.), which can cross-link two polypeptides by sequentially activating the carboxyl group of one polypeptide and then adding such to an amino group of another polypeptide. N-isocyano-ethylmorphlin, bis-diazotized-benzidine, benzoquone and glutaraldehyde, which are other reagents commonly employed to link polypeptides, can be employed in the present invention and are available from Pierce Chemical, Rockford, Ill.; Eastman Kodak Chemicals, Rochester, N.Y.; Serva, Westbury, N.Y.; Sigma Chemical Co., St. Louis, Mo.; and E. Merck, Darnstadt, West Germany (Briand et al., Synthetic peptides as antigens: pitfalls of conjugation methods, 1985, J. Immunol. Meth., 78: 59; Kitagawa et al., Enzyme coupled immunoassay of insulin using a novel coupling reagent J. Biochem., 79: 233 (1976); Liu et al., Biochem., 18: 690 (1979); Ternynck et al., Immunochem., 14: 767 (1977); and Drevin et al., Covalent coupling of proteins to erythrocytes by isocyanide. A new, sensitive and mild technique for identification and estimation of antibodies by passive hemagglutination J. Immunol. Meth., 77: 9 (1985)). One example of a conventional heterofunctional linker is shown by an eight amino acid group is shown by SEQ ID NO. 12.

| | |
|---|---|
| LRGGGGSS | (SEQ ID NO. 12) |

[0167] The improved variants of above peptide are shown by SEQ ID NO. 139.

| | |
|---|---|
| X₃X₄X₁X₁X₁X₁X₅X₅ | (SEQ ID NO. 139) |
| or | |
| X₁₂X₃X₄X₁X₁X₁X₁X₅X₅ | |

[0168] The invention also contemplates formation of a single peptide from two smaller discontinuous peptides of IL-10 that are 11.2 Angstroms in length to form a TCBL to redirect from a TH1 to a TH2 in combination with, for example, the IDDM, PV or MS inducing epitopes (Reineke et al., supra).

[0169] Linkers of varying lengths to form a single chain may also be used. For example, GGGS (SEQ ID NO. 7), GGGGS (SEQ ID NO. 9) including 1 or more repeats of the tetrapeptide or pentapeptide can be formed into the sequence shown by the following SEQ ID NO. 52 (Uger et al., supra).

| | |
|---|---|
| GGGSGTGSGSGS | (SEQ ID NO. 52) |

[0170] The improved variants of SEQ ID NO. 52 are shown by SEQ ID NO. 140.

| | |
|---|---|
| X₁X₁X₁X₅X₁X₁₀X₁X₅X₁X₅X₁X₅ | (SEQ ID NO. 140) |
| or | |
| X₁₂X₁X₁X₁X₅X₁X₁₀X₁X₅X₁X₅X₁X₅ | |

[0171] It is also noted that any of the linkers provided herein may result in a tertiary structure which might be of use to form a more avid TCBL.

[0172] The invention will now be described in further detail by way of representative examples; however, the present invention is not limited to the examples and should be construed to cover the subject matter as defined in appended claims and equivalents thereto.

[0173] As part of the understanding of the Examples, it is understood that any of the Examples may contain alternatively the above mentioned variable sequence listings SEQ ID NO.'s 7, 134, 8, 135, 10, 137, 11, 138, 12, 139, 52, and 140. However, for purposes of exemplifying the Examples a spacer GGG is shown.

### Example 1

[0174] Rheumatoid arthritis (RA), is a condition where excess Tumor necrosis factor-α (TNF-α) production is a problem and a major point of attack for new treatments. The following peptide construct is prepared for use in the treatment of RA:

(SEQ ID NO. 839)
PSTHVLITHTI-GGG-TGGKPGIAGFKGEQGPKGEP
TNF-α₇₀₋₈₀ linker C-II₂₅₄₋₂₇₃

where the peptide TNF-α₇₀₋₈₀ is known to activate macrophages (10) and the collagen type II peptide C-II₂₅₄₋₂₇₃ (TGGKPGIAGFKGEQGPKGEP (SEQ ID NO. 836)) is an epitope associated with RA. Thus, this peptide construct will be useful to achieve abortative T cell modulation since the improper sequence of events occurs with a binding that precludes the normal activation process.

[0175] Similar effects will be achieved using a peptide construct similar to the above but obtained by using, in place of TNF-α peptide α₇₀₋₈₀, the following: TNF-α antagonist: DFLPHYKNTSLGHRP (SEQ ID NO. 24) (Chirinos-Rojas et al., supra) as follows.

(SEQ ID NO. 840)
DFLPHYKNTSLGHRP-GGG-TGGKPGMFKGEQGPKGEP
TNF-α_{antagonist peptide} spacer CII₂₅₄₋₂₇₃

### Example 2

[0176] As a different approach for treating RA, the following peptide construct is prepared utilizing peptide G or a derivative thereof (derG) (DGQEEKAGVVSTGLI (SEQ ID NO. 50)) from MHC-IIβ2 (135-149) to redirect the immune response from a TH1 to a TH2:

(SEQ ID NO. 841)
NGQEEKAGVVSTGLI-GGGGS-TGGKPGIAGFKGEQGPKGEP
(MHC-IIβ2) linker C-II₂₅₄₋₂₇₃
or
(SEQ ID NO. 842)
DGQEEKAGVVSTGLI-GGGGS-TGGKPGIAGFKGEQGPKGEP
derG(MHC-IIβ2) linker C-II₂₅₄₋₂₇₃
or
(SEQ ID NO. 843)
DGQEEKAGVVSTGLI-GGG-TGGKPGIAGFKGEQGPKGEP
derG(MHC-IIβ2) linker C-II₂₅₄₋₂₇₃

### Example 3

[0177] The following peptide constructs are improved versions of SEQ ID NO. 843 in Example 2 prepared by utilizing the improved SEQ ID NO. 793-795, and its associated variants, as the TCBL, and the improved SEQ ID NO. 837 as the antigenic epitope.

(SEQ ID NO. 844)
X₂X₁X₉X₂X₂X₄X₁X₁X₃X₃X₅X₁₀X₁X₃X₃X₁X₁X₁X₁₀X₁X₁X₄X₇X₁
X₃X₁X₁X₆X₄X₁X₂X₉X₁X₇X₄X₁X₂X₇
(SEQ ID NO. 845)
X₁₂X₂X₁X₉X₂X₂X₄X₁X₁X₃X₃X₅X₁₀X₁X₃X₃X₁X₁X₁X₁₀X₁X₁X₄
X₇X₁X₃X₁X₁X₆X₄X₁X₂X₉X₁X₇X₄X₁X₂X₇
(SEQ ID NO. 846)
X₁₃X₂X₁X₉X₂X₂X₄X₁X₁X₃X₃X₅X₁₀X₁X₃X₃X₁X₁X₁X₁₀X₁X₁X₄
X₇X₁X₃X₁X₁X₆X₄X₁X₂X₉X₁X₇X₄X₁X₂X₇
(SEQ ID NO. 847)
X₁₂X₂X₁X₉X₁₁X₄X₁X₁X₁₁X₅X₁₀X₁X₁₁X₁X₁X₁X₁₀X₁X₁X₄X₇X₁
X₃X₁X₁X₆X₄X₁X₂X₉X₁X₇X₄X₁X₂X₇

### Example 4

[0178] The following peptide constructs are improved versions of SEQ ID NO. 843 in Example 2 prepared by utilizing the improved SEQ ID NO. 793-795, and its variants as the TCBL, and the improved SEQ ID NO. 838 as the antigenic epitope.

(SEQ ID NO. 848)
X₂X₁X₉X₂X₂X₄X₁X₁X₃X₃X₅X₁₀X₁X₃X₃X₁X₁X₁X₁₀X₁₅X₄X₇X₁₁
X₁₅X₆X₄X₁₅X₉X₁X₇X₄X₁₅X₇
(SEQ ID NO. 849)
X₁₂X₂X₁X₉X₂X₂X₄X₁X₁X₃X₃X₅X₁₀X₁X₃X₃X₁X₁X₁X₁₀X₁₅X₄X₇
X₁₁X₁₅X₆X₄X₁₅X₉X₁X₇X₄X₁₅X₇
(SEQ ID NO. 850)
X₁₃X₂X₁X₉X₂X₂X₄X₁X₁X₃X₃X₅X₁₀X₁X₃X₃X₁X₁X₁X₁₀X₁₅X₄X₇
X₁₁X₁₅X₆X₄X₁₅X₉X₁X₇X₄X₁₅X₇
(SEQ ID NO. 851)
X₁₂X₂X₁X₉X₁₁X₄X₁X₁X₁₁X₅X₁₀X₁X₁₁X₁X₁X₁X₁₀X₁₅X₄X₇X₁₁
X₁₅X₆X₄X₁₅X₉X₁X₇X₄X₁₅X₇

### Example 5

[0179] The following peptide construct is an example of a variant of SEQ ID NO. 51 (peptide J) as the TCBL and SEQ ID NO. 836 as the antigenic epitope.

(SEQ ID NO. 852)
DLLKNGERIEKVEGGGTGGKPGIAGFKGEQGPKGEP

[0180] Data showing the activity of this SEQ ID NO. 852 and of SEQ ID NO. 842 and SEQ ID NO 836 which are less effective in the murine CIA model of RA are shown in studies 1-5 and FIGS. 1-4.

### Example 6

[0181] The following peptide constructs are improved versions of SEQ ID NO. 852 prepared by utilizing the improved SEQ ID NO. 124 (peptide J), and its variants as the TCBL, and the improved SEQ ID NO. 837 as the antigenic epitope.

(SEQ ID NO. 853)
X₂X₃X₃X₄X₉X₁X₂X₄X₃X₂X₄X₃X₂X₁X₁X₁X₁₀X₁X₁X₄X₇X₁X₃X₁
X₁X₆X₄X₁X₂X₉X₁X₇X₄X₁X₂X₇
(SEQ ID NO. 854)
X₁₂X₂X₃X₃X₄X₉X₁X₂X₄X₃X₂X₄X₃X₂X₁X₁X₁X₁₀X₁X₁X₄X₇X₁X₃
X₁X₁X₆X₄X₁X₂X₉X₁X₇X₄X₁X₂X₇
(SEQ ID NO. 855)
X₁₂X₁₁X₄X₉X₁X₂X₄X₁₁X₄X₁₁X₁X₁X₁X₁₀X₁X₁X₄X₇X₁X₃X₁X₁
X₆X₄X₁X₂X₉X₁X₇X₄X₁X₂X₇
(SEQ ID NO. 856)
X₁₂X₁₃X₄X₉X₁X₂X₄X₁₁X₄X₁₁X₁X₁X₁X₁₀X₁X₁X₄X₇X₁X₃X₁X₁
X₆X₄X₁X₂X₉X₁X₇X₄X₁X₂X₇

### Example 7

[0182] The following peptide constructs are improved versions of SEQ ID NO. 852 prepared by utilizing the improved SEQ ID NO. 124, and its variants as the TCBL and the improved SEQ ID NO. 838 as the antigenic epitope.

(SEQ ID NO. 857)
X₂X₃X₃X₄X₉X₁X₂X₄X₃X₂X₄X₃X₂X₁X₁X₁X₁₀X₁₅X₄X₇X₁₁X₁₅X₆
X₄X₁₅X₉X₁X₇X₄X₁₅X₇
(SEQ ID NO. 858)
X₁₂X₂X₃X₃X₄X₉X₁X₂X₄X₃X₂X₄X₃X₂X₁X₁X₁X₁₀X₁₅X₄X₇X₁₁
X₁₅X₆X₄X₁₅X₉X₁X₇X₄X₁₅X₇
(SEQ ID NO. 859)
X₁₂X₁₁X₄X₉X₁X₂X₄X₁₁X₄X₁₁X₁X₁X₁X₁₀X₁₅X₄X₇X₁₁X₁₅X₆X₄
X₁₅X₉X₁X₇X₄X₁₅X₇
(SEQ ID NO. 860)
X₁₂X₁₃X₄X₉X₁X₂X₄X₁₁X₄X₁₁X₁X₁X₁X₁₀X₁₅X₄X₇X₁₁X₁₅X₆X₄
X₁₅X₉X₁X₇X₄X₁₅X₇

### Reverso Forms

### Example 8

[0183] The following peptide construct is an example of a variant of SEQ ID NO. 836 as the antigenic epitope and SEQ ID NO. 50 as the TCBL in a reverso form.

(SEQ ID NO. 861)
TGGKPGIAGFKGEQGPKGEPGGGDGQEEKAGVVSTGLI

### Example 9

[0184] The following peptide constructs are improved versions of SEQ ID NO. 861 in Example 8 prepared by utilizing the improved SEQ ID NO. 793-795, and its associated varitants, as the TCBL, and the improved SEQ ID NO. 837 as the antigenic epitope, in a reverso form.

(SEQ ID NO. 862)
X₁₀X₁X₁X₄X₇X₁X₃X₁X₁X₆X₄X₁X₂X₉X₁X₇X₄X₁X₂X₇X₁X₁X₁X₂
X₁X₉X₂X₂X₄X₁X₁X₃X₃X₅X₁₀X₁X₃X₃
(SEQ ID NO. 863)
X₁₀X₁X₁X₄X₇X₁X₃X₁X₁X₆X₄X₁X₂X₉X₁X₇X₄X₁X₂X₇X₁X₁X₁X₁₂
X₂X₁X₉X₂X₂X₄X₁X₁X₃X₃X₅X₁₀X₁X₃X₃
(SEQ ID NO. 864)
X₁₀X₁X₁X₄X₇X₁X₃X₁X₁X₆X₄X₁X₂X₉X₁X₇X₄X₁X₂X₇X₁X₁X₁X₁₃
X₂X₁X₉X₂X₂X₄X₁X₁X₃X₃X₅X₁₀X₁X₃X₃
(SEQ ID NO. 865)
X₁₀X₁X₁X₄X₇X₁X₃X₁X₁X₆X₄X₁X₂X₉X₁X₇X₄X₁X₂X₇X₁X₁X₁X₁₂
X₂X₁X₉X₁₁X₄X₁X₁X₁₁X₅X₁₀X₁X₁₁

### Example 10

[0185] The following peptide constructs are improved versions of SEQ ID NO. 861 in Example 8 prepared by utilizing the improved SEQ ID NO. 793, and its variants as the TCBL, and the improved SEQ ID NO. 838 as the antigenic epitope, in a reverso form.

(SEQ ID NO. 866)
X₁₀X₁₅X₄X₇X₁₁X₁₅X₆X₄X₁₅X₉X₁X₇X₄X₁₅X₇X₁X₁X₁X₂X₁X₉X₂
X₂X₄X₁X₁X₃X₃X₅X₁₀X₁X₃X₃
(SEQ ID NO. 867)
X₁₀X₁₅X₄X₇X₁₁X₁₅X₆X₄X₁₅X₉X₁X₇X₄X₁₅X₇X₁X₁X₁X₁₂X₂X₁
X₉X₂X₂X₄X₁X₁X₃X₃X₅X₁₀X₁X₃X₃
(SEQ ID NO. 868)
X₁₀X₁₅X₄X₇X₁₁X₁₅X₆X₄X₁₅X₉X₁X₇X₄X₁₅X₇X₁X₁X₁X₁₃X₂X₁
X₉X₂X₂X₄X₁X₁X₃X₃X₅X₁₀X₁X₃X₃
(SEQ ID NO. 869)
X₁₀X₁₅X₄X₇X₁₁X₁₅X₆X₄X₁₅X₉X₁X₇X₄X₁₅X₇X₁₂X₁X₁X₁X₂X₁
X₉X₁₁X₄X₁X₁X₁₁X₅X₁₀X₁X₁₁

### Example 11

[0186] The following peptide construct is an example of a variant of SEQ ID NO. 836 as the antigenic epitope and SEQ ID NO. 51 as the TCBL.

(SEQ ID NO. 870)
TGGKPGIAGFKGEQGPKGEPGGGDLLKNGERIEKVE

### Example 12

[0187] The following peptide constructs are improved versions of SEQ ID NO. 869 in Example 11 prepared by utilizing the improved SEQ ID NO. 124, and its associated varitants, as the TCBL, and the improved SEQ ID NO. 837 as the antigenic epitope, in a reverso form.

(SEQ ID NO. 871)
X₁₀X₁X₁X₄X₇X₁X₃X₁X₁X₆X₄X₁X₂X₉X₁X₇X₄X₁X₂X₇X₁X₁X₁X₂
X₃X₃X₄X₉X₁X₂X₄X₃X₂X₄X₃X₂
(SEQ ID NO. 872)
X₁₀X₁X₁X₄X₇X₁X₃X₁X₁X₆X₄X₁X₂X₉X₁X₇X₄X₁X₂X₇X₁X₁X₁X₁₂
X₂X₃X₃X₄X₉X₁X₂X₄X₃X₂X₄X₃X₂
(SEQ ID NO. 873)
X₁₀X₁X₁X₄X₇X₁X₃X₁X₁X₆X₄X₁X₂X₉X₁X₇X₄X₁X₂X₇X₁X₁X₁X₁₂
X₁₁X₄X₉X₁X₂X₄X₁₁X₄X₁₁
(SEQ ID NO. 874)
X₁₀X₁X₁X₄X₇X₁X₃X₁X₁X₆X₄X₁X₂X₉X₁X₇X₄X₁X₂X₇X₁X₁X₁X₁₂
X₁₃X₄X₉X₁X₂X₄X₁₁X₄X₁₁

### Example 13

[0188] The following peptide constructs are improved versions of SEQ ID NO. 869 in Example 11 prepared by utilizing the improved SEQ ID NO. 124, and its variants as the TCBL, and the improved SEQ ID NO. 838 as the antigenic epitope, in a reverso form.

(SEQ ID NO. 875)
X₁₀X₁₅X₄X₇X₁₁X₁₅X₆X₄X₁₅X₉X₁X₇X₄X₁₅X₇X₁X₁X₁X₂X₁X₉X₂
X₂X₄X₁X₁X₃X₃X₅X₁₀X₁X₃X₃
(SEQ ID NO. 876)
X₁₀X₁₅X₄X₇X₁₁X₁₅X₆X₄X₁₅X₉X₁X₇X₄X₁₅X₇X₁X₁X₁X₁₂X₂X₁
X₉X₂X₂X₄X₁X₁X₃X₃X₅X₁₀X₁X₃X₃
(SEQ ID NO. 877)
X₁₀X₁₅X₄X₇X₁₁X₁₅X₆X₄X₁₅X₉X₁X₇X₄X₁₅X₇X₁X₁X₁X₁₃X₂X₁
X₉X₂X₂X₄X₁X₁X₃X₃X₅X₁₀X₁X₃X₃
(SEQ ID NO. 878)
X₁₀X₁₅X₄X₇X₁₁X₁₅X₆X₄X₁₅X₉X₁X₇X₄X₁₅X₇X₁₂X₁X₁X₁X₂X₁
X₉X₁₁X₄X₁X₁X₁₁X₅X₁₀X₁X₁₁

### Example 14

[0189] The following peptide construct is an example of a variant of SEQ ID NO. 50 as the TCBL and SEQ ID NO. 1 as the antigenic epitope as shown in SEQ ID NO. 197.

| | |
|---|---|
| DGQEEKAGVVSTGLIGGGIAGFKGEQGPKGE | (SEQ ID NO. 197) |

### Example 15

[0190] The following reverse peptide construct is an example of a variant of SEQ ID NO. 1 as the antigenic epitope and SEQ ID NO. 50 as the TCBL as shown in SEQ ID NO. 277.

| | |
|---|---|
| IAGFKGEQGPKGEGGGDGQEEKAGVVSTGLI | (SEQ ID NO. 277) |

### Example 16

[0191] The following peptide construct is an example of a variant of SEQ ID NO. 51 as the TCBL and SEQ ID NO. 1 as the antigenic epitope as shown in SEQ ID NO. 357.

| | |
|---|---|
| DLLKNGERIEKVEGGGIAGFKGEQGPKGE | (SEQ ID NO. 357) |

### Example 17

[0192] The following reverse peptide construct is an example of a variant of SEQ ID NO. 1 as the antigenic epitope and SEQ ID NO. 51 as the TCBL as shown in SEQ ID NO. 437.

| | |
|---|---|
| IAGFKGEQGPKGEGGGDLLKNGERIEKVE | (SEQ ID NO. 437) |

### Example 18

[0193] The following peptide construct is an example of a variant of SEQ ID NO. 50 as the TCBL and SEQ ID NO. 487 as the antigenic epitope as shown in SEQ ID NO. 804.

(SEQ ID NO. 804)
DGQEEKAGVVSTGLIGGGDGEAGKPGKAGERGPPGPQG

[0194] The invention being thus described, it will be obvious that the same may be varied in many ways such that each of SEQ ID NO. 490, SEQ ID NO. 495, SEQ ID NO. 500, SEQ ID NO. 503, and SEQ ID NO. 506 or any of the antigenic peptides contained herein can be constructed so as outlined including a reversed form as shown by Examples 8-13, 15 and 17. Such variations are not to be regarded as a departure from the spirit scope of the invention and all such modifications are intended to be included within the scope of the following claims.

What is claimed is:

1. An immunomodulatory peptide construct having the formula
P₁-x-P₂
where
P₁ is a peptide associated with rheumatoid arthritis (RA), which binds to an antigen receptor on a set or subset of T cells;
P₂ is a peptide which will cause a Tₕ2 directed immune response by said set or subset of T cells to which the peptide P₁ is attached or which will bind to a T cell receptor which will cause said set or subset of T cells to which the peptide P₁ is attached to initiate, but not complete, an immune response causing said set or subset of T cells to undergo anergy and apoptosis; and
x is a direct bond or linker for covalently bonding P₁ and P₂.

2. The immunomodulatory peptide construct of claim 1 having the formula
P₁-x-P₂
where
P₁ is a peptide associated with rheumatoid arthritis (RA), which binds to an antigen receptor on a set or subset of T cells selected from the group consisting of SEQ ID NO. 836, SEQ ID NO. 1, SEQ ID NO. 487, SEQ ID NO. 490, SEQ ID NO. 495, SEQ ID NO. 500, SEQ ID NO. 503, and SEQ ID NO. 506.

3. The immunomodulatory peptide construct of claim 1 having the formula
P₁-x-P₂
where
P₂ is a peptide which will cause a Tₕ2 directed immune response by said set or subset of T cells to which the peptide P₁ is attached or which binds to a T cell receptor causing said set or subset of T cells to which the peptide P₁ is attached to initiate, but not complete, an immune response causing said set or subset of T cells to undergo anergy and apoptosis selected from the group consisting of SEQ ID NO. 15, SEQ ID NO. 50, SEQ ID NO. 4, SEQ ID NO. 51, SEQ ID NO. 463, SEQ ID NO. 5, SEQ ID NO. 18, SEQ ID NO. 129, SEQ ID NO. 21, SEQ ID NO. 13 and SEQ ID NO. 51.

4. The immunomodulatory peptide construct of claim 1 having the formula
P₁-x-P₂
where P₁ is a peptide associated with rheumatoid arthritis (RA) and the peptide construct P₁-x-P₂ is selected from the group consisting of SEQ ID NO. 197, SEQ ID NO. 277, SEQ ID NO. 357, SEQ ID NO. 437, SEQ ID NO. 804, SEQ ID NO. 839, SEQ ID NO. 840, SEQ ID NO. 841, SEQ ID NO. 842, SEQ ID NO. 843, SEQ ID NO. 852, SEQ ID NO. 861, and SEQ ID NO. 870.

5. An immunomodulatory peptide construct having the formula
P₃-x-P₄
where P₃ is a peptide construct comprised of X₁ to X₁₅ said peptide P₃ being associated with rheumatoid arthritis (RA), which binds to an antigen receptor on a set or subset of T cells, and
P₄ is a peptide construct comprised of X₁ to X₁₅ causing a Tₕ2 directed immune response by said set or subset of T cells to which the peptide P₃ is attached or which binds to a T cell receptor causing said set or subset of T cells to which the peptide P₃ is attached to initiate, but not complete, an immune response causing said set or subset of T cells to undergo anergy and apoptosis wherein
X₂ is selected from the group consisting of Ala and Gly,
X₂ is selected from the group consisting of Asp and Glu,
X₃ is selected from the group consisting of Ile, Leu and Val,
X₄ is selected from the group consisting of Lys, Arg and His,
X₅ is selected from the group consisting of Cys and Ser,
X₆ is selected from the group consisting of Phe, Trp and Tyr,
X₇ is selected from the group consisting of Phe and Pro,
X₈ is selected from the group consisting of Met and Nle,
X₉ is selected from the group consisting of Asn and Gln,
X₁₀ is selected from the group consisting of Thr and Ser,
X₁₁ is Gaba^{X} where X₂X₃, X₃X₂, X₂X₃, X₃X₂, X₃X₃, or X₂X₂ can be substituted with X₁₁;
X₁₂ is selected from the group consisting of acetyl, propionyl group, D glycine, D alanine and cyclohexylalanine;
X₁₃ is 5-aminopentanoic where any combination of 3 to 4 amino acids of X₂ and X₃ can be replaced with X₁₃;
X₁₄ is selected from the group consisting of X₁, X₂, X₃, X₄, X₅, X₆, X₇, X₈, X₉ and X₁₀;
X₁₅ is selected from the group consisting of X₁X₁, X₁X₃, X₃X₁, X₁X₂ and X₂X₁; and
x is a direct bond or linker for covalently bonding P₃ and P₄.

6. The immunomodulatory peptide construct of claim 5 having the formula
P₃-x-P₄
where P₃ is a peptide associated with rheumatoid arthritis (RA) and the peptide construct P₃-x-P₄ is selected from the group consisting of SEQ ID NO. 198, SEQ ID NO. 278, SEQ ID NO. 358, SEQ ID NO. 438, SEQ ID NO. 805, SEQ ID NO. 837-838, SEQ ID NO. 844-851, SEQ ID NO. 853-860, SEQ ID NO. 862-869, and SEQ ID NO. 871-878.

The application's sequence listing, which the Patent Office published only in electronic form, follows.

SEQUENCE LISTING (879 sequences)

SEQ ID NO: 1 - protein, 13 aa, Artificial Sequence
  peptide construct
IAGFKGEQGPKGE

SEQ ID NO: 2 - protein, 8 aa, Artificial Sequence
  peptide construct
KNIVTPRT

SEQ ID NO: 3 - protein, 15 aa, Artificial Sequence
  peptide construct
GDKVSFFCKNKEKKC

SEQ ID NO: 4 - protein, 17 aa, Artificial Sequence
  peptide construct
VLWKKQKDKVAELENSE

SEQ ID NO: 5 - protein, 11 aa, Artificial Sequence
  peptide construct
PSTHVLITHTI

SEQ ID NO: 6 - protein, 15 aa, Artificial Sequence
  peptide construct
DFLPHYKNTSLGHRP

SEQ ID NO: 7 - protein, 4 aa, Artificial Sequence
  peptide construct
GGGS

SEQ ID NO: 8 - protein, 5 aa, Artificial Sequence
  peptide construct
GGGSS

SEQ ID NO: 9 - protein, 5 aa, Artificial Sequence
  peptide construct
GGGGS

SEQ ID NO: 10 - protein, 6 aa, Artificial Sequence
  peptide construct
GGGGSS

SEQ ID NO: 11 - protein, 8 aa, Artificial Sequence
  peptide construct
GGGSGGGS

SEQ ID NO: 12 - protein, 8 aa, Artificial Sequence
  peptide construct
LRGGGGSS

SEQ ID NO: 13 - protein, 9 aa, Artificial Sequence
  peptide construct
VQGEESNDK

SEQ ID NO: 14 - protein, 37 aa, Artificial Sequence
  peptide construct
NGQEEKAGVVSTGLIGGGDSAFDVLSFTAEEKAGVYK

SEQ ID NO: 15 - protein, 15 aa, Artificial Sequence
  peptide construct
NGQEEKAGVVSTGLI

SEQ ID NO: 16 - protein, 19 aa, Artificial Sequence
  peptide construct
DSAFDVLSFTAEEKAGVYK

SEQ ID NO: 17 - protein, 60 aa, Artificial Sequence
  peptide construct
VLWKKQKDKVAELENSEGGGGSQAFTLLPSGDALPSLLRGGGGSSQVRLQPRGMGAHSPG

SEQ ID NO: 18 - protein, 9 aa, Artificial Sequence
  peptide construct
AYMTMKIRN

SEQ ID NO: 19 - protein, 17 aa, Artificial Sequence
  peptide construct
EIIVTHFPFDEQNCSMK

SEQ ID NO: 20 - protein, 31 aa, Artificial Sequence
  peptide construct
AYMTMKIRNGGGGSEIIVTHFPFDEQNCSMK

SEQ ID NO: 21 - protein, 7 aa, Artificial Sequence
  peptide construct
DQTQDTE

SEQ ID NO: 22 - protein, 29 aa, Artificial Sequence
  peptide construct
DQTQDTEGGGGSEIIVTHFPFDEQNCSMK

SEQ ID NO: 23 - protein, 27 aa, Artificial Sequence
  peptide construct
PSTHVLITHTIGGGIAGFKGEQGPKGE

SEQ ID NO: 24 - protein, 15 aa, Artificial Sequence
  peptide construct
DFLPHYKNTSLGHRP

SEQ ID NO: 25 - protein, 31 aa, Artificial Sequence
  peptide construct
DFLPHYKNTSLGHRPGGGIAGFKGEQGPKGE

SEQ ID NO: 26 - protein, 33 aa, Artificial Sequence
  peptide construct
NGQEEKAGVVSTGLIGGGGSIAGFKGEQGPKGE

SEQ ID NO: 27 - protein, 32 aa, Artificial Sequence
  peptide construct
DGQEEKAGVVSTGLIGGGGSIAGFKGEQGPKG

SEQ ID NO: 28 - protein, 31 aa, Artificial Sequence
  peptide construct
DNQLLETCKQDRLRNRRGNGSSTHFEGNLPC

SEQ ID NO: 29 - protein, 55 aa, Artificial Sequence
  peptide construct
DNQLLETCKQDRLRNRRGNGSSTHFEGNLPCGGGGSDSAFDVLSFTAEEKAGVYK

SEQ ID NO: 30 - protein, 26 aa, Artificial Sequence
  peptide construct
DQTQDTEGGGGSSVHFFKNIVTPRTP

SEQ ID NO: 31 - protein, 28 aa, Artificial Sequence
  peptide construct
DQTQDTEGGGGSSGDKVSFFCKNKEKKC

SEQ ID NO: 32 - protein, 30 aa, Artificial Sequence
  peptide construct
DQTQDTEGGGGSSYQQLNSERGVPNENIEN

SEQ ID NO: 33 - protein, 42 aa, Artificial Sequence
  peptide construct
VLWKKQKDKVAELENSEGGGGSSIQTQMKTYSDIDGKLVSEV

SEQ ID NO: 34 - protein, 36 aa, Artificial Sequence
  peptide construct
VLWKKQKDKVAELENSEGGGGSSVFIKRVSNVIIHG

SEQ ID NO: 35 - protein, 38 aa, Artificial Sequence
  peptide construct
VLWKKQKDKVAELENSEGGGGSSIASRRVDGIIAAYQN

SEQ ID NO: 36 - protein, 38 aa, Artificial Sequence
  peptide construct
VLWKKQKDKVAELENSEGGGGSSMKVTVAFNQFGPNRR

SEQ ID NO: 37 - protein, 42 aa, Artificial Sequence
  peptide construct
VLWKKQKDKVAELENSEGGGGSSIDIFASKNFHLQKNTIGTG

SEQ ID NO: 38 - protein, 35 aa, Artificial Sequence
  peptide construct
VLWKKQKDKVAELENSEGGGGSSYFVGKMYFNLID

SEQ ID NO: 39 - protein, 38 aa, Artificial Sequence
  peptide construct
DQTQDTEGGGGSSGIGAVLKVLTTGPALISWIKRKRQQ

SEQ ID NO: 40 - protein, 13 aa, Artificial Sequence
  peptide construct
IAGFKGEQGPKGE

SEQ ID NO: 41 - protein, 13 aa, Artificial Sequence
  peptide construct
VHFFKNIVTPRTP

SEQ ID NO: 42 - protein, 17 aa, Artificial Sequence
  peptide construct
YQQLNSERGVPNENIEN

SEQ ID NO: 43 - protein, 19 aa, Artificial Sequence
  peptide construct
IQTQMKTYSDIDGKLVSEV

SEQ ID NO: 44 - protein, 13 aa, Artificial Sequence
  peptide construct
VFIKRVSNVIIHG

SEQ ID NO: 45 - protein, 15 aa, Artificial Sequence
  peptide construct
MKVTVAFNQFGPNRR

SEQ ID NO: 46 - protein, 15 aa, Artificial Sequence
  peptide construct
IASRRVDGIIAAYQN

SEQ ID NO: 47 - protein, 19 aa, Artificial Sequence
  peptide construct
IDIFASKNFHLQKNTIGTG

SEQ ID NO: 48 - protein, 12 aa, Artificial Sequence
  peptide construct
YFVGKMYFNLID

SEQ ID NO: 49 - protein, 25 aa, Artificial Sequence
  peptide construct
GIGAVLKVLTTGPALISWIKRKRQQ

SEQ ID NO: 50 - protein, 15 aa, Artificial Sequence
  peptide construct
DGQEEKAGVVSTGLI

SEQ ID NO: 51 - protein, 13 aa, Artificial Sequence
  peptide construct
DLLKNGERIEKVE

SEQ ID NO: 52 - protein, 12 aa, Artificial Sequence
  peptide construct
GGGSGTGSGSGS

SEQ ID NO: 53 - protein, 40 aa, Artificial
  peptide construct
DAEFRHDSGYEVHHQKLVFFAEDVGSNKGAIIGLMVGGVV

SEQ ID NO: 54 - protein, 40 aa, Artificial
  peptide construct
  MISC_FEATURE (1)..(1): X is D and E for acidic amino acids
  MOD_RES (1)..(1): ACETYLATION
  MISC_FEATURE (2)..(2): X is A or G
  MISC_FEATURE (3)..(3): X is D and E for acidic amino acids
  MISC_FEATURE (4)..(4): X is F, W or Y for aromatic amino acids
  MISC_FEATURE (5)..(5): X is K, R or H for basic amino acids
  MISC_FEATURE (6)..(6): X is K, R or H for basic amino acids
  MISC_FEATURE (7)..(7): X is D and E for acidic amino acids
  MISC_FEATURE (8)..(8): X is T or S
  MISC_FEATURE (9)..(9): X is A or G
  MISC_FEATURE (10)..(10): X is F, W or Y for aromatic amino acids
  MISC_FEATURE (11)..(11): X is D and E for acidic amino acids
  MOD_RES (11)..(11): 4Abu
  MISC_FEATURE (12)..(12): X is I, L or V
  MISC_FEATURE (13)..(13): X is K, R or H for basic amino acids
  MISC_FEATURE (14)..(14): X is K, R or H for basic amino acids
  MISC_FEATURE (15)..(15): X is N or Q for amidated amino acids
  MISC_FEATURE (16)..(16): X is K, R or H for basic amino acids
  MISC_FEATURE (17)..(17): X is I, L or V
  MOD_RES (17)..(17): 4Abu
  MISC_FEATURE (18)..(18): X is I, L or V
  MISC_FEATURE (19)..(19): X is F, W or Y for aromatic amino acids
  MISC_FEATURE (20)..(20): X is F, W or Y for aromatic amino acids
  MISC_FEATURE (21)..(21): X is A or G
  MISC_FEATURE (22)..(22): X is D and E for acidic amino acids
  MOD_RES (22)..(22): GAMMA-CARBOXYGLUTAMIC ACID HYDROXYLATION
  MISC_FEATURE (23)..(23): X is D and E for acidic amino acids
  MISC_FEATURE (24)..(24): X is I, L or V
  MISC_FEATURE (25)..(25): X is A or G
  MISC_FEATURE (26)..(26): X is C or S
  MISC_FEATURE (27)..(27): X is N or Q for amidated amino acids
  MISC_FEATURE (28)..(28): X is K, R or H for basic amino acids
  MISC_FEATURE (29)..(29): X is A or G
  MISC_FEATURE (30)..(30): X is A or G
  MISC_FEATURE (31)..(31): X is I, L or V
  MOD_RES (31)..(31): 4Abu
  MISC_FEATURE (32)..(32): X is I, L or V
  MISC_FEATURE (33)..(33): X is A or G
  MISC_FEATURE (34)..(34): X is I, L or V
  MISC_FEATURE (35)..(35): X is M or Nle
  MISC_FEATURE (36)..(36): X is I, L or V
  MISC_FEATURE (37)..(37): X is A or G
  MISC_FEATURE (38)..(38): X is A or G
  MISC_FEATURE (39)..(39): X is I, L or V
  MOD_RES (39)..(39): 4Abu
  MISC_FEATURE (40)..(40): X is I, L or V
XXXXXXXXXXXXXXXXXXXXXXXXXXXXXXXXXXXXXXXX

SEQ ID NO: 55 - protein, 28 aa, Artificial
  Completely synthesized peptide construct
DAEFRHDSGYEVHHQKLVFFAENVGSNK

SEQ ID NO: 56 - protein, 28 aa, Artificial
  peptide construct
  MISC_FEATURE (1)..(1): X is D and E for acidic amino acids
  MOD_RES (1)..(1): ACETYLATION
  MISC_FEATURE (2)..(2): X is A or G
  MISC_FEATURE (3)..(3): X is D and E for acidic amino acids
  MISC_FEATURE (4)..(4): X is F, W or Y for aromatic amino acids
  MISC_FEATURE (5)..(5): X is K, R or H for basic amino acids
  MISC_FEATURE (6)..(6): X is K, R or H for basic amino acids
  MISC_FEATURE (7)..(7): X is D and E for acidic amino acids
  MISC_FEATURE (8)..(8): X is T or S
  MISC_FEATURE (9)..(9): X is A or G
  MISC_FEATURE (10)..(10): X is F, W or Y for aromatic amino acids
  MISC_FEATURE (11)..(11): X is D and E for acidic amino acids
  MOD_RES (11)..(11): 4Abu
  MISC_FEATURE (12)..(12): X is I, L or V
  MISC_FEATURE (13)..(13): X is K, R or H for basic amino acids
  MISC_FEATURE (14)..(14): X is K, R or H for basic amino acids
  MISC_FEATURE (15)..(15): X is N or Q for amidated amino acids
  MISC_FEATURE (16)..(16): X is K, R or H for basic aminio acids
  MISC_FEATURE (17)..(17): X is I, L or V
  MOD_RES (17)..(17): 4Abu
  MISC_FEATURE (18)..(18): X is I, L or V
  MISC_FEATURE (19)..(19): X is F, W or Y for aromatic amino acids
  MISC_FEATURE (20)..(20): X is F, W or Y for aromatic amino acids
  MISC_FEATURE (21)..(21): X is A or G
  MISC_FEATURE (22)..(22): X is D and E for acidic amino acids
  MOD_RES (22)..(22): 4Abu
  MOD_RES (22)..(22): GAMMA-CARBOXYGLUTAMIC ACID HYDROXYLATION
  MISC_FEATURE (23)..(23): X is D and E for acidic amino acids
  MISC_FEATURE (24)..(24): X is I, L or V
  MISC_FEATURE (25)..(25): X is A or G
  MISC_FEATURE (26)..(26): X is C or S
  MISC_FEATURE (27)..(27): X is N or Q for amidated amino acids
  MISC_FEATURE (28)..(28): X is K, R or H for basic amino acids
XXXXXXXXXXXXXXXXXXXXXXXXXXXX

SEQ ID NO: 57 - protein, 30 aa, Artificial
  Completely synthesized peptide construct
DAEFRHDSGYEVHHQKLVFFAENVGSNKAI

SEQ ID NO: 58 - protein, 30 aa, Artificial
  peptide construct
  MISC_FEATURE (1)..(1): X is D and E for acidic amino acids
  MOD_RES (1)..(1): ACETYLATION
  MISC_FEATURE (2)..(2): X is A or G
  MISC_FEATURE (3)..(3): X is D and E for acidic amino acids
  MISC_FEATURE (4)..(4): X is F, W or Y for aromatic amino acids
  MISC_FEATURE (5)..(5): X is K, R or H for basic amino acids
  MISC_FEATURE (6)..(6): X is K, R or H for basic amino acids
  MISC_FEATURE (7)..(7): X is D and E for acidic amino acids
  MISC_FEATURE (8)..(8): X is T or S
  MISC_FEATURE (9)..(9): X is A or G
  MISC_FEATURE (10)..(10): X is F, W or Y for aromatic amino acids
  MISC_FEATURE (11)..(11): X is D and E for acidic amino acids
  MOD_RES (11)..(11): 4Abu
  MISC_FEATURE (12)..(12): X is I, L or V
  MISC_FEATURE (13)..(13): X is K, R or H for basic amino acids
  MISC_FEATURE (14)..(14): X is K, R or H for basic amino acids
  MISC_FEATURE (15)..(15): X is N or Q for amidated amino acids
  MISC_FEATURE (16)..(16): X is K, R or H for basic amino acids
  MISC_FEATURE (17)..(17): X is I, L or V
  MOD_RES (17)..(17): 4Abu
  MISC_FEATURE (18)..(18): X is I, L or V
  MISC_FEATURE (19)..(19): X is F, W or Y for aromatic amino acids
  MISC_FEATURE (20)..(20): X is F, W or Y for aromatic amino acids
  MISC_FEATURE (21)..(21): X is A or G
  MISC_FEATURE (22)..(22): X is D and E for acidic amino acids
  MOD_RES (22)..(22): 4Abu
  MOD_RES (22)..(22): GAMMA-CARBOXYGLUTAMIC ACID HYDROXYLATION
  MISC_FEATURE (23)..(23): X is D and E for acidic amino acids
  MISC_FEATURE (24)..(24): X is I, L or V
  MISC_FEATURE (25)..(25): X is A or G
  MISC_FEATURE (26)..(26): X is C or S
  MISC_FEATURE (27)..(27): X is N or Q for amidated amino acids
  MISC_FEATURE (28)..(28): X is K, R or H for basic amino acids
  MISC_FEATURE (29)..(29): X is A or G
  MISC_FEATURE (30)..(30): X is I, L or V
XXXXXXXXXXXXXXXXXXXXXXXXXXXXXX

SEQ ID NO: 59 - protein, 11 aa, Artificial
  Completely synthesized peptide construct
DAEFRHDSGYE

SEQ ID NO: 60 - protein, 11 aa, Artificial
  peptide construct
  MISC_FEATURE (1)..(1): X is D and E for acidic amino acids
  MOD_RES (1)..(1): ACETYLATION
  MISC_FEATURE (2)..(2): X is A or G
  MISC_FEATURE (3)..(3): X is D and E for acidic amino acids
  MISC_FEATURE (4)..(4): X is F, W or Y for aromatic amino acids
  MISC_FEATURE (5)..(5): X is K, R or H for basic amino acids
  MISC_FEATURE (6)..(6): X is K, R or H for basic amino acids
  MISC_FEATURE (7)..(7): X is D and E for acidic amino acids
  MISC_FEATURE (8)..(8): X is T or S
  MISC_FEATURE (9)..(9): X is A or G
  MISC_FEATURE (10)..(10): X is F, W or Y for aromatic amino acids
  MISC_FEATURE (11)..(11): X is D and E for acidic amino acids
XXXXXXXXXXX

SEQ ID NO: 61 - protein, 7 aa, Artificial
  Completely synthesized peptide construct
ENVGSNK

SEQ ID NO: 62 - protein, 7 aa, Artificial
  peptide construct
  MISC_FEATURE (1)..(1): X is D and E for acidic amino acids
  MOD_RES (1)..(1): ACETYLATION
  MOD_RES (1)..(1): 4Abu
  MOD_RES (1)..(1): 4Abu
  MOD_RES (1)..(1): GAMMA-CARBOXYGLUTAMIC ACID HYDROXYLATION
  MISC_FEATURE (2)..(2): X is D and E for acidic amino acids
  MISC_FEATURE (3)..(3): X is I, L or V
  MISC_FEATURE (4)..(4): X is A or G
  MISC_FEATURE (5)..(5): X is C or S
  MISC_FEATURE (6)..(6): X is N or Q for amidated amino acids
  MISC_FEATURE (7)..(7): X is K, R or H for basic amino acids
XXXXXXX

SEQ ID NO: 63 - protein, 12 aa, Artificial
  Completely synthesized peptide construct
DAEFRHDSGYEV

SEQ ID NO: 64 - protein, 12 aa, Artificial
  peptide construct
  MISC_FEATURE (1)..(1): X is D and E for acidic amino acids
  MOD_RES (1)..(1): ACETYLATION
  MISC_FEATURE (2)..(2): X is A or G
  MISC_FEATURE (3)..(3): X is D and E for acidic amino acids
  MISC_FEATURE (4)..(4): X is F, W or Y for aromatic amino acids
  MISC_FEATURE (5)..(5): X is K, R or H for basic amino acids
  MISC_FEATURE (6)..(6): X is K, R or H for basic amino acids
  MISC_FEATURE (7)..(7): X is D and E for acidic amino acids
  MISC_FEATURE (8)..(8): X is T or S
  MISC_FEATURE (9)..(9): X is A or G
  MISC_FEATURE (10)..(10): X is F, W or Y for aromatic amino acids
  MISC_FEATURE (11)..(11): X is D and E for acidic amino acids
  MOD_RES (11)..(11): 4Abu
  MISC_FEATURE (12)..(12): X is I, L or V
XXXXXXXXXXXX

SEQ ID NO: 65 - protein, 10 aa, Artificial
  Completely synthesized peptide construct
DAEFRHDSGY

SEQ ID NO: 66 - protein, 10 aa, Artificial
  peptide construct
  MISC_FEATURE (1)..(1): X is D and E for acidic amino acids
  MOD_RES (1)..(1): ACETYLATION
  MISC_FEATURE (2)..(2): X is A or G
  MISC_FEATURE (3)..(3): X is D and E for acidic amino acids
  MISC_FEATURE (4)..(4): X is F, W or Y for aromatic amino acids
  MISC_FEATURE (5)..(5): X is K, R or H for basic amino acids
  MISC_FEATURE (6)..(6): X is K, R or H for basic amino acids
  MISC_FEATURE (7)..(7): X is D and E for acidic amino acids
  MISC_FEATURE (8)..(8): X is T or S
  MISC_FEATURE (9)..(9): X is A or G
  MISC_FEATURE (10)..(10): X is F, W or Y for aromatic amino acids
XXXXXXXXXX

SEQ ID NO: 67 - protein, 4 aa, Artificial
  Completely synthesized peptide construct
EFRH

SEQ ID NO: 68 - protein, 4 aa, Artificial
  peptide construct
  MISC_FEATURE (1)..(1): X is D and E for acidic amino acids
  MOD_RES (1)..(1): ACETYLATION
  MISC_FEATURE (2)..(2): X is F or P
  MISC_FEATURE (3)..(3): X is K, R or H for basic amino acids
  MISC_FEATURE (4)..(4): X is K, R or H for basic amino acids
XXXX

SEQ ID NO: 69 - protein, 19 aa, Artificial
  peptide construct
  MISC_FEATURE (1)..(1): X is D and E for acidic amino acids
  MOD_RES (1)..(1): ACETYLATION
  MISC_FEATURE (2)..(2): X is C or S
  MISC_FEATURE (3)..(3): X is A or G
  MISC_FEATURE (4)..(4): X is F, W or Y for aromatic amino acids
  MISC_FEATURE (5)..(5): X is D and E for acidic amino acids
  MOD_RES (5)..(5): GAMMA-CARBOXYGLUTAMIC ACID HYDROXYLATION
  MOD_RES (5)..(5): 4Abu
  MISC_FEATURE (6)..(6): X is I, L or V
  MISC_FEATURE (7)..(7): X is I, L or V
  MISC_FEATURE (8)..(8): X is C or S
  MISC_FEATURE (9)..(9): X is F, W or Y for aromatic amino acids
  MISC_FEATURE (10)..(10): X is T or S
  MISC_FEATURE (11)..(11): X is A or G
  MISC_FEATURE (12)..(12): X is D and E for acidic amino acids
  MOD_RES (12)..(12): 4Abu
  MISC_FEATURE (13)..(13): X is D and E for acidic amino acids
  MISC_FEATURE (14)..(14): X is K, R or H for basic amino acids
  MISC_FEATURE (15)..(15): X is A or G
  MISC_FEATURE (16)..(16): X is A or G
  MISC_FEATURE (17)..(17): X is I, L or V
  MISC_FEATURE (18)..(18): X is F, W or Y for aromatic amino acids
  MISC_FEATURE (19)..(19): X is K, R or H for basic amino acids
XXXXXXXXXXXXXXXXXXX

SEQ ID NO: 70 - protein, 14 aa, Artificial
  Completely synthesized peptide construct
  MOD_RES (1)..(1): ACETYLATION
SLKLMATLFSTYAS

SEQ ID NO: 71 - protein, 14 aa, Artificial
  Completely synthesized peptide construct
  MISC_FEATURE (1)..(1): X is C or S
  MISC_FEATURE (2)..(2): X is I, L or V
  MISC_FEATURE (3)..(3): X is K, R or H for basic amino acids
  MISC_FEATURE (4)..(4): X is I, L or V
  MISC_FEATURE (5)..(5): X is M or Nle
  MISC_FEATURE (6)..(6): X is A or G
  MISC_FEATURE (7)..(7): X is T or S
  MISC_FEATURE (8)..(8): X is I, L or V
  MISC_FEATURE (9)..(9): X is F or P
  MISC_FEATURE (10)..(10): X is C or S
  MISC_FEATURE (11)..(11): X is T or S
  MISC_FEATURE (12)..(12): X is F, W or Y for aromatic amino acids
  MISC_FEATURE (13)..(13): X is A or G
  MISC_FEATURE (14)..(14): X is C or S
XXXXXXXXXXXXXX

SEQ ID NO: 72 - protein, 14 aa, Artificial
  Completely synthesized peptide construct
  MOD_RES (1)..(1): ACETYLATION
SLKLMATLFSSYAT

SEQ ID NO: 73 - protein, 14 aa, Artificial
  Completely synthesized peptide construct
  MOD_RES (1)..(1): ACETYLATION
  MISC_FEATURE (2)..(2): X is C or S
  MISC_FEATURE (3)..(3): X is I, L or V
  MISC_FEATURE (4)..(4): X is K, R or H for basic amino acids
  MISC_FEATURE (5)..(5): X is I, L or V
  MISC_FEATURE (6)..(6): X is M or Nle
  MISC_FEATURE (7)..(7): X is A or G
  MISC_FEATURE (8)..(8): X is Tor S
  MISC_FEATURE (9)..(9): X is I, L or V
  MISC_FEATURE (10)..(10): X is F or P
  MISC_FEATURE (11)..(11): X is C or S
  MISC_FEATURE (12)..(12): X is C or S
  MISC_FEATURE (13)..(13): X is F, W or Y for aromatic amino acids
  MISC_FEATURE (14)..(14): X is A or G
  MISC_FEATURE (15)..(15): X is T or S
XXXXXXXXXXXXXX

SEQ ID NO: 74 - protein, 11 aa, Artificial
  Completely synthesized peptide construct
NITEIADLTQK

SEQ ID NO: 75 - protein, 11 aa, Artificial
  peptide construct
  MISC_FEATURE (1)..(1): X is N or Q for amidated amino acids
  MOD_RES (1)..(1): ACETYLATION
  MISC_FEATURE (2)..(2): X is I, L or V
  MISC_FEATURE (3)..(3): X is T or S
  MISC_FEATURE (4)..(4): X is D and E for acidic amino acids
  MOD_RES (4)..(4): 4Abu
  MISC_FEATURE (5)..(5): X is I, L or V
  MISC_FEATURE (6)..(6): X is A or G
  MISC_FEATURE (7)..(7): X is D and E for acidic amino acids
  MOD_RES (7)..(7): 4Abu
  MISC_FEATURE (8)..(8): X is I, L or V
  MISC_FEATURE (9)..(9): X is T or S
  MISC_FEATURE (10)..(10): X is N or Q for amidated amino acids
  MISC_FEATURE (11)..(11): X is K, R or H for basic amino acids
XXXXXXXXXXX

SEQ ID NO: 76 - protein, 40 aa, Artificial
  Completely synthesized peptide construct
NMYAMMIARFKMFPEVKEKGMAALPRLIAFTSEHSHFSLK

SEQ ID NO: 77 - protein, 40 aa, Artificial; identical to SEQ ID NO: 54
  peptide construct
  MISC_FEATURE (1)..(1): X is N or Q for amidated amino acids
  MOD_RES (1)..(1): ACETYLATION
  MISC_FEATURE (2)..(2): X is M or Nle
  MISC_FEATURE (3)..(3): X is F, W or Y for aromatic amino acids
  MISC_FEATURE (4)..(4): X is A or G
  MISC_FEATURE (5)..(5): X is M or Nle
  MISC_FEATURE (6)..(6): X is M or Nle
  MISC_FEATURE (7)..(7): X is I, L or V
  MISC_FEATURE (8)..(8): X is A or G
  MISC_FEATURE (9)..(9): X is K, R or H for basic amino acids
  MISC_FEATURE (10)..(10): X is F, W or Y for aromatic amino acids
  MISC_FEATURE (11)..(11): X is K, R or H for basic amino acids
  MISC_FEATURE (12)..(12): X is M or Nle
  MISC_FEATURE (13)..(13): X is F, W or Y for aromatic amino acids
  MISC_FEATURE (14)..(14): X is F or P
  MISC_FEATURE (15)..(15): X is D and E for acidic amino acids
  MOD_RES (15)..(15): 4Abu
  MISC_FEATURE (16)..(16): X is I, L or V
  MISC_FEATURE (17)..(17): X is K, R or H for basic amino acids
  MISC_FEATURE (18)..(18): X is D and E for acidic amino acids
  MISC_FEATURE (19)..(19): X is K, R or H for basic amino acids
  MISC_FEATURE (20)..(20): X is A or G
  MISC_FEATURE (21)..(21): X is M or Nle
  MISC_FEATURE (22)..(22): X is A or G
  MISC_FEATURE (23)..(23): X is A or G
  MISC_FEATURE (24)..(24): X is I, L or V
  MISC_FEATURE (25)..(25): X is F or P
  MISC_FEATURE (26)..(26): X is K, R or H for basic amino acids
  MISC_FEATURE (27)..(27): X is I, L or V
  MOD_RES (27)..(27): 4Abu
  MISC_FEATURE (28)..(28): X is I, L or V
  MISC_FEATURE (29)..(29): X is A or G
  MISC_FEATURE (30)..(30): X is F, W or Y for aromatic amino acids
  MISC_FEATURE (31)..(31): X is T or S
  MISC_FEATURE (32)..(32): X is C or S
  MISC_FEATURE (33)..(33): X is D and E for acidic amino acids
  MISC_FEATURE (34)..(34): X is K, R or H for basic amino acids
  MISC_FEATURE (35)..(35): X is C or S
  MISC_FEATURE (36)..(36): X is K, R or H for basic amino acids
  MISC_FEATURE (37)..(37): X is F, W or Y for aromatic amino acids
  MISC_FEATURE (38)..(38): X is C or S
  MISC_FEATURE (39)..(39): X is I, L or V
  MISC_FEATURE (40)..(40): X is K, R or H for basic amino acids

SEQ ID NO: 78 - protein, 34 aa, Artificial
  Completely synthesized peptide construct
IARFKMFPEVKEKGMAALPRLIAFTSEHSHFSLK

SEQ ID NO: 79 - protein, 34 aa, Artificial
  peptide construct
  MISC_FEATURE (1)..(1): X is I, L or V
  MOD_RES (1)..(1): ACETYLATION
  MISC_FEATURE (2)..(2): X is A or G
  MISC_FEATURE (3)..(3): X is K, R or H for basic amino acids
  MISC_FEATURE (4)..(4): X is F, W or Y or aromatic amino acids
  MISC_FEATURE (5)..(5): X is K, R or H for basic amino acids
  MISC_FEATURE (6)..(6): X is M or Nle
  MISC_FEATURE (7)..(7): X is F,  W or Y for aromatic amino acids
  MISC_FEATURE (8)..(8): X is F or P
  MISC_FEATURE (9)..(9): X is D and E for acidic amino acids
  MISC_FEATURE (10)..(10): X is I, L or V
  MISC_FEATURE (11)..(11): X is K, R or H for basic amino acids
  MISC_FEATURE (12)..(12): X is D and E for acidic amino acids
  MISC_FEATURE (13)..(13): X is K, R or H for basic amino acids
  MISC_FEATURE (14)..(14): X is A or G
  MISC_FEATURE (15)..(15): X is M or Nle
  MISC_FEATURE (16)..(16): X is A or G
  MISC_FEATURE (17)..(17): X is A or G
  MISC_FEATURE (18)..(18): X is I, L or V
  MISC_FEATURE (19)..(19): X is  F or P
  MISC_FEATURE (20)..(20): X is K, R or H for basic amino acids
  MISC_FEATURE (21)..(21): X is I, L or V
  MOD_RES (21)..(21): 4Abu
  MISC_FEATURE (22)..(22): X is I, L or V
  MISC_FEATURE (23)..(23): X is A or G
  MISC_FEATURE (24)..(24): X is F, W or Y for aromatic amino acids
  MISC_FEATURE (25)..(25): X is T or S
  MISC_FEATURE (26)..(26): X is C or S
  MISC_FEATURE (27)..(27): X is D and E for acidic amino acids
  MISC_FEATURE (28)..(28): X is K, R or H for basic amino acids
  MISC_FEATURE (29)..(29): X is C or S
  MISC_FEATURE (30)..(30): X is K, R or H for basic amino acids
  MISC_FEATURE (31)..(31): X is F, W or Y for aromatic amino acids
  MISC_FEATURE (32)..(32): X is C or S
  MISC_FEATURE (33)..(33): X is C or S
  MISC_FEATURE (34)..(34): X is I, L or V
  MISC_FEATURE (35)..(35): X is K, R or H for basic amino acids
XXXXXXXXXXXXXXXXXXXXXXXXXXXXXXXXXX

SEQ ID NO: 80 - protein, 20 aa, Artificial
  Completely synthesized peptide construct
SRLSKVAPVIKARMMEYGTT

SEQ ID NO: 81 - protein, 20 aa, Artificial
  Completely synthesized peptide construct
  MISC_FEATURE (1)..(1): X is C or S
  MOD_RES (1)..(1): ACETYLATION
  MISC_FEATURE (2)..(2): X is K, R or H for basic amino acids
  MISC_FEATURE (3)..(3): X is I, L or V
  MISC_FEATURE (4)..(4): X is C or S
  MISC_FEATURE (5)..(5): X is K, R or H for basic amino acids
  MISC_FEATURE (6)..(6): X is I, L or V
  MISC_FEATURE (7)..(7): X is A or G
  MISC_FEATURE (8)..(8): X is F or P
  MISC_FEATURE (9)..(9): X is I, L or V
  MISC_FEATURE (10)..(10): X is I, L or V
  MISC_FEATURE (11)..(11): X is K, R or H for basic amino acids
  MISC_FEATURE (12)..(12): X is A or G
  MISC_FEATURE (13)..(13): X is K, R or H for basic amino acids
  MISC_FEATURE (14)..(14): X is M or Nle
  MISC_FEATURE (15)..(15): X is M or Nle
  MISC_FEATURE (16)..(16): X is D or E for  acidic amino acids
  MISC_FEATURE (17)..(17): X is F, W or Y for aromatic amino acids
  MISC_FEATURE (18)..(18): X is A or G
  MISC_FEATURE (19)..(19): X is T or S
  MISC_FEATURE (20)..(20): X is T or S
XXXXXXXXXXXXXXXXXXXX

SEQ ID NO: 82 - protein, 19 aa, Artificial
  Completely synthesized peptide construct
IPPSLRYLEDEERMSRLSK

SEQ ID NO: 83 - protein, 18 aa, Artificial
  peptide construct
  MISC_FEATURE (1)..(1): X is I, L or V
  MOD_RES (1)..(1): acetylation
  MOD_RES (1)..(1): GAMMA-CARBOXYGLUTAMIC ACID HYDROXYLATION
  MISC_FEATURE (2)..(2): X is F or P
  MISC_FEATURE (3)..(3): X is F or P
  MISC_FEATURE (4)..(4): X is C or S
  MISC_FEATURE (5)..(5): X is I, L or V
  MISC_FEATURE (6)..(6): X is K, R or H for basic amino acids
  MISC_FEATURE (7)..(7): X is F, W or Y for aromatic amino acids
  MISC_FEATURE (8)..(8): X is D and E for acidic amino acids
  MISC_FEATURE (9)..(9): X is D and E for acidic amino acids
  MISC_FEATURE (10)..(10): X is D and E for acidic amino acids
  MISC_FEATURE (11)..(11): X is D and E for acidic amino acids
  MISC_FEATURE (12)..(12): X is K, R or H for basic amino acids
  MISC_FEATURE (13)..(13): X is M or Nle
  MISC_FEATURE (14)..(14): X is C or S
  MISC_FEATURE (15)..(15): X is K, R or H for basic amino acids
  MISC_FEATURE (16)..(16): X is I, L or V
  MISC_FEATURE (17)..(17): X is C or S
  MISC_FEATURE (18)..(18): X is K, R or H for basic amino acids
XXXXXXXXXXXXXXXXXX

SEQ ID NO: 84 - protein, 20 aa, Artificial
  Completely synthesized peptide construct
NTNMFTYEIAPVFVLLEYVT

SEQ ID NO: 85 - protein, 20 aa, Artificial
  peptide construct
  MISC_FEATURE (1)..(1): X is N or Q for amidated amino acids
  MOD_RES (1)..(1): ACETYLATION
  MISC_FEATURE (2)..(2): X is T or S
  MISC_FEATURE (3)..(3): X is N or Q for amidated amino acids
  MISC_FEATURE (4)..(4): X is M or Nle
  MISC_FEATURE (5)..(5): X is F, W or Y for aromatic amino acids
  MISC_FEATURE (6)..(6): X is T or S
  MISC_FEATURE (7)..(7): X is F, W or Y for aromatic amino acids
  MISC_FEATURE (8)..(8): X is D and E for acidic amino acids
  MOD_RES (8)..(8): 4Abu
  MISC_FEATURE (9)..(9): X is I, L or V
  MISC_FEATURE (10)..(10): X is A or G
  MISC_FEATURE (11)..(11): X is F or P
  MISC_FEATURE (12)..(12): X is I, L or V
  MISC_FEATURE (13)..(13): X is F, W or Y for aromatic amino acids
  MISC_FEATURE (14)..(14): X is I, L or V
  MOD_RES (14)..(14): 4Abu
  MOD_RES (14)..(14): 4Abu
  MOD_RES (14)..(14): GAMMA-CARBOXYGLUTAMIC ACID HYDROXYLATION
  MISC_FEATURE (15)..(15): X is I, L or V
  MISC_FEATURE (16)..(16): X is I, L or V
  MISC_FEATURE (17)..(17): X is D and E for acidic amino acids
  MISC_FEATURE (18)..(18): X is F, W or Y for aromatic amino acids
  MISC_FEATURE (19)..(19): X is I, L or V
  MISC_FEATURE (20)..(20): X is T or S
XXXXXXXXXXXXXXXXXXXX

SEQ ID NO: 86 - protein, 15 aa, Artificial
  Completely synthesized peptide construct
FKADEKKFWGKYLYE

SEQ ID NO: 87 - protein, 15 aa, Artificial
  peptide construct
  MISC_FEATURE (1)..(1): X is F, W or Y for aromatic amino acids
  MOD_RES (1)..(1): ACETYLATION
  MISC_FEATURE (2)..(2): X is K, R or H for basic amino acids
  MISC_FEATURE (3)..(3): X is A or G
  MISC_FEATURE (4)..(4): X is D and E for acidic amino acids
  MOD_RES (4)..(4): 4Abu
  MISC_FEATURE (5)..(5): X is D and E for acidic amino acids
  MISC_FEATURE (6)..(6): X is K, R or H for basic amino acids
  MISC_FEATURE (7)..(7): X is K, R or H for basic amino acids
  MISC_FEATURE (8)..(8): X is F, W or Y for aromatic amino acids
  MISC_FEATURE (9)..(9): X is F, W or Y for aromatic amino acids
  MISC_FEATURE (10)..(10): X is A or G
  MISC_FEATURE (11)..(11): X is K, R or H for basic amino acids
  MISC_FEATURE (12)..(12): X is F, W or Y for aromatic amino acids
  MISC_FEATURE (13)..(13): X is I, L or V
  MISC_FEATURE (14)..(14): X is F, W or Y for aromatic amino acids
  MISC_FEATURE (15)..(15): X is D and E for acidic amino acids
XXXXXXXXXXXXXXX

SEQ ID NO: 88 - protein, 15 aa, Artificial
  Completely synthesized peptide construct
SHLVEALYLVCGERG

SEQ ID NO: 89 - protein, 14 aa, Artificial
  peptide construct
  MISC_FEATURE (1)..(1): X is C or S
  MOD_RES (1)..(1): ACETYLATION
  MISC_FEATURE (2)..(2): X is K, R or H for basic amino acids
  MISC_FEATURE (3)..(3): X is I, L or V
  MOD_RES (3)..(3): 4Abu
  MOD_RES (3)..(3): GAMMA-CARBOXYGLUTAMIC ACID HYDROXYLATION
  MISC_FEATURE (4)..(4): X is I, L or V
  MISC_FEATURE (5)..(5): X is D and E for acidic amino acids
  MISC_FEATURE (6)..(6): X is  A or G
  MISC_FEATURE (7)..(7): X is I, L or V
  MISC_FEATURE (8)..(8): X is F, W or Y for aromatic amino acids
  MISC_FEATURE (9)..(9): X is I, L or V
  MISC_FEATURE (10)..(10): X is C or S
  MISC_FEATURE (11)..(11): X is A or G
  MISC_FEATURE (12)..(12): X is D and E for acidic amino acids
  MISC_FEATURE (13)..(13): X is K, R or H for basic amino acids
  MISC_FEATURE (14)..(14): X is A or G
XXXXXXXXXXXXXX

SEQ ID NO: 90 - protein, 24 aa, Artificial
  Completely synthesized peptide construct
VLGGGCALLRCIPALDSLTPANED

SEQ ID NO: 91 - protein, 24 aa, Artificial
  peptide construct
  MISC_FEATURE (1)..(1): X is I, L or V
  MOD_RES (1)..(1): ACETYLATION
  MOD_RES (1)..(1): 4Abu
  MISC_FEATURE (2)..(2): X is I, L or V
  MISC_FEATURE (3)..(3): X is A or G
  MISC_FEATURE (4)..(4): X is A or G
  MISC_FEATURE (5)..(5): X is A or G
  MISC_FEATURE (6)..(6): X is C or S
  MISC_FEATURE (7)..(7): X is A or G
  MISC_FEATURE (8)..(8): X is I, L or V
  MOD_RES (8)..(8): 4Abu
  MISC_FEATURE (9)..(9): X is I, L or V
  MISC_FEATURE (10)..(10): X is K, R or H for basic amino acids
  MISC_FEATURE (11)..(11): X is  C or S
  MISC_FEATURE (12)..(12): X is I, L or V
  MISC_FEATURE (13)..(13): X is F or P
  MISC_FEATURE (14)..(14): X is A or G
  MISC_FEATURE (15)..(15): X is I, L or V
  MOD_RES (15)..(15): 4Abu
  MISC_FEATURE (16)..(16): X is D and E for acidic amino acids
  MISC_FEATURE (17)..(17): X is C or S
  MISC_FEATURE (18)..(18): X is I, L or V
  MISC_FEATURE (19)..(19): X is T or S
  MISC_FEATURE (20)..(20): X is F or P
  MISC_FEATURE (21)..(21): X is A or G
  MISC_FEATURE (22)..(22): X is N or Q for amidated amino acids
  MISC_FEATURE (23)..(23): X is D and E for acidic amino acids
  MOD_RES (23)..(23): 4Abu
  MISC_FEATURE (24)..(24): X is D and E for acidic amino acids
XXXXXXXXXXXXXXXXXXXXXXXX

SEQ ID NO: 92 - protein, 28 aa, Artificial
  Completely synthesized peptide construct
EACVTSWLWSGEGAVFYRVDLHFINLGT

SEQ ID NO: 93 - protein, 28 aa, Artificial
  peptide construct
  MISC_FEATURE (1)..(1): X is D and E for acidic amino acids
  MOD_RES (1)..(1): ACETYLATION
  MISC_FEATURE (2)..(2): X is A or G
  MISC_FEATURE (3)..(3): X is C or S
  MISC_FEATURE (4)..(4): X is I, L or V
  MISC_FEATURE (5)..(5): X is T or S
  MISC_FEATURE (6)..(6): X is C or S
  MISC_FEATURE (7)..(7): X is F, W or Y for aromatic amino acids
  MISC_FEATURE (8)..(8): X is I, L or V
  MISC_FEATURE (9)..(9): X is F, W or Y for aromatic amino acids
  MISC_FEATURE (10)..(10): X is C or S
  MISC_FEATURE (11)..(11): X is A or G
  MISC_FEATURE (12)..(12): X is D and E for acidic amino acids
  MISC_FEATURE (13)..(13): X is A or G
  MISC_FEATURE (14)..(14): X is A or G
  MISC_FEATURE (15)..(15): X is I,  L or V
  MISC_FEATURE (16)..(16): X is F, W or Y for aromatic amino acids
  MISC_FEATURE (17)..(17): X is F, W or Y for aromatic amino acids
  MISC_FEATURE (18)..(18): X is K, R or H for basic amino acids
  MISC_FEATURE (19)..(19): X is I, L or V
  MOD_RES (19)..(19): 4Abu
  MOD_RES (19)..(19): GAMMA-CARBOXYGLUTAMIC ACID HYDROXYLATION
  MISC_FEATURE (20)..(20): X is D and E for acidic amino acids
  MISC_FEATURE (21)..(21): X is I, L or V
  MISC_FEATURE (22)..(22): X is K, R or H for basic amino acids
  MISC_FEATURE (23)..(23): X is F, W or Y for aromatic amino acids
  MISC_FEATURE (24)..(24): X is I, L or V
  MISC_FEATURE (25)..(25): X is N or Q for amidated amino acids
  MISC_FEATURE (26)..(26): X is I, L or V
  MISC_FEATURE (27)..(27): X is  A or G
  MISC_FEATURE (28)..(28): X is T or S
XXXXXXXXXXXXXXXXXXXXXXXXXXXX

SEQ ID NO: 94 - protein, 21 aa, Artificial
  Completely synthesized peptide construct
MDFWCVEHDRPPPATPTSLTT

SEQ ID NO: 95 - protein, 21 aa, Artificial
  peptide construct
  MISC_FEATURE (1)..(1): X is M or Nle
  MOD_RES (1)..(1): ACETYLATION
  MISC_FEATURE (2)..(2): X is D and E for acidic amino acids
  MISC_FEATURE (3)..(3): X is F, W or Y for aromatic amino acids
  MISC_FEATURE (4)..(4): X is F, W or Y for aromatic amino acids
  MISC_FEATURE (5)..(5): X is C or S
  MISC_FEATURE (6)..(6): X is I, L or V
  MOD_RES (6)..(6): 4Abu
  MISC_FEATURE (7)..(7): X is D and E for acidic amino acids
  MISC_FEATURE (8)..(8): X is K, R or H for basic amino acids
  MISC_FEATURE (9)..(9): X is D and E for acidic amino acids
  MISC_FEATURE (10)..(10): X is K, R or H for basic amino acids
  MISC_FEATURE (11)..(11): X is F or P
  MISC_FEATURE (12)..(12): X is F or P
  MISC_FEATURE (13)..(13): X is F or P
  MISC_FEATURE (14)..(14): X is A or G
  MISC_FEATURE (15)..(15): X is T or S
  MISC_FEATURE (16)..(16): X is F or P
  MISC_FEATURE (17)..(17): X is T or S
  MISC_FEATURE (18)..(18): X is  C or S
  MISC_FEATURE (19)..(19): X is I, L or V
  MISC_FEATURE (20)..(20): X is T or S
  MISC_FEATURE (21)..(21): X is T or S
XXXXXXXXXXXXXXXXXXXXX

SEQ ID NO: 96 - protein, 20 aa, Artificial
  Completely synthesized peptide construct
NMYAMMIARFKMFPEVKEKG

SEQ ID NO: 97 - protein, 20 aa, Artificial
  peptide construct
  MISC_FEATURE (1)..(1): X is N or Q for amidated amino acids
  MOD_RES (1)..(1): ACETYLATION
  MISC_FEATURE (2)..(2): X is M or Nle
  MISC_FEATURE (3)..(3): X is F, W or Y for aromatic amino acids
  MISC_FEATURE (4)..(4): X is A or G
  MISC_FEATURE (5)..(5): X is M or Nle
  MISC_FEATURE (6)..(6): X is M or Nle
  MISC_FEATURE (7)..(7): X is I, L or V
  MISC_FEATURE (8)..(8): X is A or G
  MISC_FEATURE (9)..(9): X is K, R or H for basic amino acids
  MISC_FEATURE (10)..(10): X is F, W or Y for aromatic amino acids
  MISC_FEATURE (11)..(11): X is K, R or H for basic amino acids
  MISC_FEATURE (12)..(12): X is M or Nle
  MISC_FEATURE (13)..(13): X is F, W or Y for aromatic amino acids
  MISC_FEATURE (14)..(14): X is F or P
  MISC_FEATURE (15)..(15): X is D and E for acidic amino acids
  MOD_RES (15)..(15): 4Abu
  MISC_FEATURE (16)..(16): X is I, L or V
  MISC_FEATURE (17)..(17): X is K, R or H for basic amino acids
  MISC_FEATURE (18)..(18): X is D and E for acidic amino acids
  MISC_FEATURE (19)..(19): X is K, R or H for basic amino acids
  MISC_FEATURE (20)..(20): X is  A or G
XXXXXXXXXXXXXXXXXXXX

SEQ ID NO: 98 - protein, 33 aa, Artificial
  Completely synthesized peptide construct
NMYAMMIARFKMFPEVKEKGMAALPRLIAFTSE

SEQ ID NO: 99 - protein, 33 aa, Artificial
  peptide construct
  MISC_FEATURE (1)..(1): X is N or Q for amidated amino acids
  MOD_RES (1)..(1): ACETYLATION
  MISC_FEATURE (1)..(1): X is N or Q for amidated amino acids
  MISC_FEATURE (2)..(2): X is M or Nle
  MISC_FEATURE (3)..(3): X is F, W or Y for aromatic amino acids
  MISC_FEATURE (4)..(4): X is A or G
  MISC_FEATURE (5)..(5): X is M or Nle
  MISC_FEATURE (6)..(6): X is M or Nle
  MISC_FEATURE (7)..(7): X is I, L or V
  MISC_FEATURE (8)..(8): X is A or G
  MISC_FEATURE (9)..(9): X is K, R or H for basic amino acids
  MISC_FEATURE (10)..(10): X is F, W or Y for aromatic amino acids
  MISC_FEATURE (11)..(11): X is K, R or H for basic amino acids
  MISC_FEATURE (12)..(12): X is M or Nle
  MISC_FEATURE (13)..(13): X is F, W or Y for aromatic amino acids
  MISC_FEATURE (14)..(14): X is F or P
  MISC_FEATURE (15)..(15): X is D and E for acidic amino acids
  MOD_RES (15)..(15): 4Abu
  MISC_FEATURE (16)..(16): X is I, L or V
  MISC_FEATURE (17)..(17): X is K, R or H for basic amino acids
  MISC_FEATURE (18)..(18): X is D and E for acidic amino acids
  MISC_FEATURE (19)..(19): X is K, R or H for basic amino acids
  MISC_FEATURE (20)..(20): X is A or G
  MISC_FEATURE (21)..(21): X is M or Nle
  MISC_FEATURE (22)..(22): X is A or G
  MISC_FEATURE (23)..(23): X is A or G
  MISC_FEATURE (24)..(24): X is I, L or V
  MISC_FEATURE (25)..(25): X is F or P
  MISC_FEATURE (26)..(26): X is K, R or H for basic amino acids
  MISC_FEATURE (27)..(27): X is I, L or V
  MOD_RES (27)..(27): 4Abu
  MISC_FEATURE (28)..(28): X is I, L or V
  MISC_FEATURE (29)..(29): X is A or G
  MISC_FEATURE (30)..(30): X is F, W or Y or aromatic amino acids
  MISC_FEATURE (31)..(31): X is T or S
  MISC_FEATURE (32)..(32): X is C or S
  MISC_FEATURE (33)..(33): X is D and E for acidic amino acids
XXXXXXXXXXXXXXXXXXXXXXXXXXXXXXXXX

SEQ ID NO: 100 - protein, 13 aa, Artificial
  Completely synthesized peptide construct
IAFTSEHSHFSLK

SEQ ID NO: 101 - protein, 13 aa, Artificial
  peptide construct
  MISC_FEATURE (1)..(1): X is I, L or V
  MOD_RES (1)..(1): ACETYLATION
  MISC_FEATURE (2)..(2): X is A or G
  MISC_FEATURE (3)..(3): X is F, W or Y for aromatic amino acids
  MISC_FEATURE (4)..(4): X is T or S
  MISC_FEATURE (5)..(5): X is C or S
  MISC_FEATURE (6)..(6): X is D and  E for acidic amino acids
  MISC_FEATURE (7)..(7): X is K, R or H for basic amino acids
  MISC_FEATURE (8)..(8): X is C or S
  MISC_FEATURE (9)..(9): X is K, R or H for basic amino acids
  MISC_FEATURE (10)..(10): X is F, W or Y for aromatic amino acids
  MISC_FEATURE (11)..(11): X is C or S
  MISC_FEATURE (12)..(12): X is I, L or V
  MISC_FEATURE (13)..(13): X is K,  R or H for basic amino acids
XXXXXXXXXXXXX

SEQ ID NO: 102 - protein, 21 aa, Artificial
  Completely synthesized peptide construct
MDFWCVEHDRPPPATPTSLTT

SEQ ID NO: 103 - protein, 21 aa, Artificial
  peptide construct
  MISC_FEATURE (1)..(1): X is M or Nle
  MOD_RES (1)..(1): ACETYLATION
  MISC_FEATURE (2)..(2): X is D and E for acidic amino acids
  MISC_FEATURE (3)..(3): X is F, W or Y for aromatic amino acids
  MISC_FEATURE (4)..(4): X is F, W or Y for aromatic amino acids
  MISC_FEATURE (5)..(5): X is C or S
  MISC_FEATURE (6)..(6): X is I, L or V
  MOD_RES (6)..(6): 4Abu
  MISC_FEATURE (7)..(7): X is D and E for acidic amino acids
  MISC_FEATURE (8)..(8): X is K, R or H for basic amino acids
  MISC_FEATURE (9)..(9): X is D and E for acidic amino acids
  MISC_FEATURE (10)..(10): X is K, R or H for basic amino acids
  MISC_FEATURE (11)..(11): X is F or P
  MISC_FEATURE (12)..(12): X is F or P
  MISC_FEATURE (13)..(13): X is F or P
  MISC_FEATURE (14)..(14): X is A or G
  MISC_FEATURE (15)..(15): X is Tor S
  MISC_FEATURE (16)..(16): X is F or P
  MISC_FEATURE (17)..(17): X is T or S
  MISC_FEATURE (18)..(18): X is C or S
  MISC_FEATURE (19)..(19): X is I, L or V
  MISC_FEATURE (20)..(20): X is T or S
  MISC_FEATURE (21)..(21): X is T or S
XXXXXXXXXXXXXXXXXXXXX

SEQ ID NO: 104 - protein, 10 aa, Artificial
  Completely synthesized peptide construct
ERPTLAFLQD

SEQ ID NO: 105 - protein, 10 aa, Artificial
  peptide construct
  MISC_FEATURE (1)..(1): X is D and E for acidic amino acids
  MOD_RES (1)..(1): ACETYLATION
  MISC_FEATURE (2)..(2): X is K, R or H for basic amino acids
  MISC_FEATURE (3)..(3): X is F or P
  MISC_FEATURE (4)..(4): X is T or S
  MISC_FEATURE (5)..(5): X is I, L or V
  MISC_FEATURE (6)..(6): X is A or G
  MISC_FEATURE (7)..(7): X is F, W or Y for aromatic amino acids
  MISC_FEATURE (8)..(8): X is I,  L or V
  MISC_FEATURE (9)..(9): X is N or Q for amidated amino acids
  MISC_FEATURE (10)..(10): X is D and E for acidic amino acids
XXXXXXXXXX

SEQ ID NO: 106 - protein, 10 aa, Artificial
  Completely synthesized peptide construct
DRSTKVIDFH

SEQ ID NO: 107 - protein, 10 aa, Artificial
  peptide construct
  MISC_FEATURE (1)..(1): X is D and E for acidic amino acids
  MOD_RES (1)..(1): ACETYLATION
  MISC_FEATURE (2)..(2): X is K, R or H for basic amino acids
  MISC_FEATURE (3)..(3): X is C  or S
  MISC_FEATURE (4)..(4): X is T or S
  MISC_FEATURE (5)..(5): X is K, R or H for basic amino acids
  MISC_FEATURE (6)..(6): X is I, L or V
  MOD_RES (6)..(6): 4Abu
  MOD_RES (6)..(6): GAMMA-CARBOXYGLUTAMIC ACID HYDROXYLATION
  MISC_FEATURE (7)..(7): X is I, L or V
  MISC_FEATURE (8)..(8): X is  D and E for acidic amino acids
  MISC_FEATURE (9)..(9): X is F, W or Y for aromatic amino acids
  MISC_FEATURE (10)..(10): X is K, R or H for basic amino acids
XXXXXXXXXX

SEQ ID NO: 108 - protein, 13 aa, Artificial
  peptide construct
  MISC_FEATURE (1)..(1): X is I, L or V
  MOD_RES (1)..(1): ACETYLATION
  MISC_FEATURE (2)..(2): X is A or G
  MISC_FEATURE (3)..(3): X is A or G
  MISC_FEATURE (4)..(4): X is F,  W or Y for aromatic amino acids
  MISC_FEATURE (5)..(5): X is K, R or H for basic amino acids
  MISC_FEATURE (6)..(6): X is A or G
  MISC_FEATURE (7)..(7): X is D and E for acidic amino acids
  MISC_FEATURE (8)..(8): X is N or Q for amidated amino acids
  MISC_FEATURE (9)..(9): X is A or G
  MISC_FEATURE (10)..(10): X is F or P
  MISC_FEATURE (11)..(11): X is K, R or H for basic amino acids
  MISC_FEATURE (12)..(12): X is A or G
  MISC_FEATURE (13)..(13): X is D and E for acidic amino acids
XXXXXXXXXXXXX

SEQ ID NO: 109 - protein, 8 aa, Artificial
  peptide construct
  MISC_FEATURE (1)..(1): X is K, R or H for basic amino acids
  MOD_RES (1)..(1): ACETYLATION
  MISC_FEATURE (2)..(2): X is N or Q for amidated amino acids
  MISC_FEATURE (3)..(3): X is I, L or V
  MOD_RES (3)..(3): 4Abu
  MISC_FEATURE (4)..(4): X is I, L or V
  MISC_FEATURE (5)..(5): X is T or S
  MISC_FEATURE (6)..(6): X is  F or P
  MISC_FEATURE (7)..(7): X is K, R or H for basic amino acids
  MISC_FEATURE (8)..(8): X is T or S
XXXXXXXX

SEQ ID NO: 110 - protein, 15 aa, Artificial
  Completely synthesized peptide construct
GDKVSFFCKNKEKKC

SEQ ID NO: 111 - protein, 15 aa, Artificial
  peptide construct
  MISC_FEATURE (1)..(1): X is A or G
  MOD_RES (1)..(1): ACETYLATION
  MISC_FEATURE (2)..(2): X is D and E for acidic amino acids
  MISC_FEATURE (3)..(3): X is K, R or H for basic amino acids
  MISC_FEATURE (4)..(4): X is I, L or V
  MISC_FEATURE (5)..(5): X is C or S
  MISC_FEATURE (6)..(6): X is F, W or Y for aromatic amino acids
  MISC_FEATURE (7)..(7): X is F, W or Y for aromatic amino acids
  MISC_FEATURE (8)..(8): X is C or S
  MISC_FEATURE (9)..(9): X is K, R or H for basic amino acids
  MISC_FEATURE (10)..(10): X is N or Q for amidated amino acids
  MISC_FEATURE (11)..(11): X is K, R or H for basic amino acids
  MISC_FEATURE (12)..(12): X is D and E for acidic amino acids
  MISC_FEATURE (13)..(13): X is K, R or H for basic amino acids
  MISC_FEATURE (14)..(14): X is K, R or H for basic amino acids
  MISC_FEATURE (15)..(15): X is C or S
XXXXXXXXXXXXXXX

SEQ ID NO: 112 - protein, 17 aa, Artificial
  Completely synthesized peptide construct
EIIVTHFPFDEQNCSMK

SEQ ID NO: 113 - protein, 17 aa, Artificial
  peptide construct
  MISC_FEATURE (1)..(1): X is D and E for acidic amino acids
  MOD_RES (1)..(1): ACETYLATION
  MOD_RES (1)..(1): 4Abu
  MOD_RES (1)..(1): 4Abu
  MOD_RES (1)..(1): GAMMA-CARBOXYGLUTAMIC ACID HYDROXYLATION
  MISC_FEATURE (2)..(2): X is I, L or V
  MISC_FEATURE (3)..(3): X is I, L or V
  MISC_FEATURE (4)..(4): X is I, L or V
  MISC_FEATURE (5)..(5): X is T or S
  MISC_FEATURE (6)..(6): X is K, R or H for basic amino acids
  MISC_FEATURE (7)..(7): X is F, W or Y for aromatic amino acids
  MISC_FEATURE (8)..(8): X is F or P
  MISC_FEATURE (9)..(9): X is F, W or Y for aromatic amino acids
  MISC_FEATURE (10)..(10): X is D and E for acidic amino acids
  MOD_RES (10)..(10): 4Abu
  MOD_RES (10)..(10): 4Abu
  MISC_FEATURE (11)..(11): X is D and E for acidic amino acids
  MISC_FEATURE (12)..(12): X is N or Q for amidated amino acids
  MISC_FEATURE (13)..(13): X is N or Q for amidated amino acids
  MISC_FEATURE (14)..(14): X is C or S
  MISC_FEATURE (15)..(15): X is C or S
  MISC_FEATURE (16)..(16): X is M or Nle
  MISC_FEATURE (17)..(17): X is K, R or H for basic amino acids
XXXXXXXXXXXXXXXXX

SEQ ID NO: 114 - protein, 13 aa, Artificial
  peptide construct
  MISC_FEATURE (1)..(1): X is I, L or V
  MOD_RES (1)..(1): ACETYLATION
  MISC_FEATURE (2)..(2): X is K, R or H for basic amino acids
  MISC_FEATURE (3)..(3): X is F, W or Y for aromatic amino acids
  MISC_FEATURE (4)..(4): X is F, W or Y for aromatic amino acids
  MISC_FEATURE (5)..(5): X is K, R or H for basic amino acids
  MISC_FEATURE (6)..(6): X is N or Q for amidated amino acids
  MISC_FEATURE (7)..(7): X is I, L or V
  MOD_RES (7)..(7): 4Abu
  MISC_FEATURE (8)..(8): X is I, L or V
  MISC_FEATURE (9)..(9): X is T or S
  MISC_FEATURE (10)..(10): X is F or P
  MISC_FEATURE (11)..(11): X is K, R or H for basic amino acids
  MISC_FEATURE (12)..(12): X is Tor S
  MISC_FEATURE (13)..(13): X is F or P
XXXXXXXXXXXXX

SEQ ID NO: 115 - protein, 17 aa, Artificial
  peptide construct
  MISC_FEATURE (1)..(1): X is F, W or Y for aromatic amino acids
  MOD_RES (1)..(1): ACETYLATION
  MISC_FEATURE (2)..(2): X is N or Q for amidated amino acids
  MISC_FEATURE (3)..(3): X is N or Q for amidated amino acids
  MISC_FEATURE (4)..(4): X is I, L or V
  MISC_FEATURE (5)..(5): X is N or Q for amidated amino acids
  MISC_FEATURE (6)..(6): X is C or S
  MISC_FEATURE (7)..(7): X is D and E for acidic amino acids
  MISC_FEATURE (8)..(8): X is K, R or H for basic amino acids
  MISC_FEATURE (9)..(9): X is  A or G
  MISC_FEATURE (10)..(10): X is I,  L or V
  MISC_FEATURE (11)..(11): X is F or P
  MISC_FEATURE (12)..(12): X is N or Q for amidated amino acids
  MISC_FEATURE (13)..(13): X is D and E for acidic amino acids
  MISC_FEATURE (14)..(14): X is N or Q for amidated amino acids
  MISC_FEATURE (15)..(15): X is I, L or V
  MOD_RES (15)..(15): 4Abu
  MISC_FEATURE (16)..(16): X is D and E for acidic amino acids
  MISC_FEATURE (17)..(17): X is N or Q for amidated amino acids
XXXXXXXXXXXXXXXXX

SEQ ID NO: 116 - protein, 13 aa, Artificial
  peptide construct
  MISC_FEATURE (1)..(1): X is I, L or V
  MOD_RES (1)..(1): ACETYLATION
  MISC_FEATURE (2)..(2): X is F, W or Y for aromatic amino acids
  MISC_FEATURE (3)..(3): X is I, L or V
  MISC_FEATURE (4)..(4): X is K, R or H for basic amino acids
  MISC_FEATURE (5)..(5): X is K, R or H for basic amino acids
  MISC_FEATURE (6)..(6): X is I, L or V
  MISC_FEATURE (7)..(7): X is C or S
  MISC_FEATURE (8)..(8): X is N or Q for amidated amino acids
  MISC_FEATURE (9)..(9): X is I, L or V
  MOD_RES (9)..(9): 4Abu
  MOD_RES (9)..(9): GAMMA-CARBOXYGLUTAMIC ACID HYDROXYLATION
  MISC_FEATURE (10)..(10): X is I, L or V
  MISC_FEATURE (11)..(11): X is I, L or V
  MISC_FEATURE (12)..(12): X is K, R or H for basic amino acids
  MISC_FEATURE (13)..(13): X is  A or G
XXXXXXXXXXXXX

SEQ ID NO: 117 - protein, 15 aa, Artificial
  peptide construct
  MISC_FEATURE (1)..(1): X is M or Nle
  MOD_RES (1)..(1): ACETYLATION
  MISC_FEATURE (2)..(2): X is K, R or H for basic amino acids
  MISC_FEATURE (3)..(3): X is I, L or V
  MISC_FEATURE (4)..(4): X is T or S
  MISC_FEATURE (5)..(5): X is I, L or V
  MISC_FEATURE (6)..(6): X is A or G
  MISC_FEATURE (7)..(7): X is F, W or Y for aromatic amino acids
  MISC_FEATURE (8)..(8): X is N or Q for amidated amino acids
  MISC_FEATURE (9)..(9): X is N or Q for amidated amino acids
  MISC_FEATURE (10)..(10): X is F, W or Y for aromatic amino acids
  MISC_FEATURE (11)..(11): X is A or G
  MISC_FEATURE (12)..(12): X is F or P
  MISC_FEATURE (13)..(13): X is N or Q for amidated amino acids
  MISC_FEATURE (14)..(14): X is K, R or H for basic amino acids
  MISC_FEATURE (15)..(15): X is K, R or H for basic amino acids
XXXXXXXXXXXXXXX

SEQ ID NO: 118 - protein, 15 aa, Artificial
  peptide construct
  MISC_FEATURE (1)..(1): X is I, L or V
  MOD_RES (1)..(1): ACETYLATION
  MISC_FEATURE (2)..(2): X is A or G
  MISC_FEATURE (3)..(3): X is C or S
  MISC_FEATURE (4)..(4): X is K, R or H for basic amino acids
  MISC_FEATURE (5)..(5): X is K, R or H for basic amino acids
  MISC_FEATURE (6)..(6): X is I, L or V
  MOD_RES (6)..(6): 4Abu
  MISC_FEATURE (7)..(7): X is D and E for acidic amino acids
  MISC_FEATURE (8)..(8): X is A or G
  MISC_FEATURE (9)..(9): X is I, L or V
  MOD_RES (9)..(9): 4Abu
  MISC_FEATURE (10)..(10): X is I, L or V
  MISC_FEATURE (11)..(11): X is A or G
  MISC_FEATURE (12)..(12): X is A or G
  MISC_FEATURE (13)..(13): X is F, W or Y for aromatic amino acids
  MISC_FEATURE (14)..(14): X is N or Q for amidated amino acids
  MISC_FEATURE (15)..(15): X is N or Q for amidated amino acids
XXXXXXXXXXXXXXX

SEQ ID NO: 119 - protein, 19 aa, Artificial
  peptide construct
  MISC_FEATURE (1)..(1): X is I, L or V
  MOD_RES (1)..(1): 4Abu
  MOD_RES (1)..(1): GAMMA-CARBOXYGLUTAMIC ACID HYDROXYLATION
  MOD_RES (1)..(1): ACETYLATION
  MISC_FEATURE (2)..(2): X is D and E for acidic amino acids
  MISC_FEATURE (3)..(3): X is I, L or V
  MISC_FEATURE (4)..(4): X is F, W or Y for aromatic amino acids
  MISC_FEATURE (5)..(5): X is A or G
  MISC_FEATURE (6)..(6): X is C or S
  MISC_FEATURE (7)..(7): X is K, R or H for basic amino acids
  MISC_FEATURE (8)..(8): X is N or Q for amidated amino acids
  MISC_FEATURE (9)..(9): X is F, W or Y for aromatic amino acids
  MISC_FEATURE (10)..(10): X is K, R or H or basic amino acids
  MISC_FEATURE (11)..(11): X is I, L or V
  MISC_FEATURE (12)..(12): X is N or Q for amidated amino acids
  MISC_FEATURE (13)..(13): X is K, R or H for basic amino acids
  MISC_FEATURE (14)..(14): X is N or Q for amidated amino acids
  MISC_FEATURE (15)..(15): X is T or S
  MISC_FEATURE (16)..(16): X is I, L  or V
  MISC_FEATURE (17)..(17): X is A or G
  MISC_FEATURE (18)..(18): X is T or S
  MISC_FEATURE (19)..(19): X is A or G
XXXXXXXXXXXXXXXXXXX

SEQ ID NO: 120 - protein, 25 aa, Artificial
  peptide construct
  MISC_FEATURE (1)..(1): X is A or G
  MOD_RES (1)..(1): ACETYLATION
  MISC_FEATURE (2)..(2): X is I, L or V
  MISC_FEATURE (3)..(3): X is A or G
  MISC_FEATURE (4)..(4): X is A or G
  MISC_FEATURE (5)..(5): X is I, L or V
  MOD_RES (5)..(5): 4Abu
  MISC_FEATURE (6)..(6): X is I, L or V
  MISC_FEATURE (7)..(7): X is K, R or H for basic amino acids
  MISC_FEATURE (8)..(8): X is I, L or V
  MOD_RES (8)..(8): 4Abu
  MISC_FEATURE (9)..(9): X is I, L or V
  MISC_FEATURE (10)..(10): X is T or S
  MISC_FEATURE (11)..(11): X is T or S
  MISC_FEATURE (12)..(12): X is A or G
  MISC_FEATURE (13)..(13): X is F or P
  MISC_FEATURE (14)..(14): X is A or G
  MISC_FEATURE (15)..(15): X is I, L or V
  MOD_RES (15)..(15): 4Abu
  MISC_FEATURE (16)..(16): X is I, L or V
  MISC_FEATURE (17)..(17): X is C or S
  MISC_FEATURE (18)..(18): X is F, W or Y for basic amino acids
  MISC_FEATURE (19)..(19): X is I, L or V
  MISC_FEATURE (20)..(20): X is K, R or H for basic amino acids
  MISC_FEATURE (21)..(21): X is K, R or H for basic amino acids
  MISC_FEATURE (22)..(22): X is K, R or H for basic amino acids
  MISC_FEATURE (23)..(23): X is K, R or H for basic amino acids
  MISC_FEATURE (24)..(24): X is N or Q for amidated amino acids
  MISC_FEATURE (25)..(25): X is N or Q for amidated amino acids
XXXXXXXXXXXXXXXXXXXXXXXXX

SEQ ID NO: 121 - protein, 18 aa, Artificial
  peptide construct
  MISC_FEATURE (1)..(1): X is N or Q for amidated amino acids
  MOD_RES (1)..(1): ACETYLATION
  MISC_FEATURE (2)..(2): X is A or G
  MISC_FEATURE (3)..(3): X is N or Q for amidated amino acids
  MISC_FEATURE (4)..(4): X is D and E for acidic amino acids
  MOD_RES (4)..(4): 4Abu
  MISC_FEATURE (5)..(5): X is D and E for acidic amino acids
  MISC_FEATURE (6)..(6): X is K, R or H for basic amino acids
  MISC_FEATURE (7)..(7): X is A or G
  MISC_FEATURE (8)..(8): X is A or G
  MISC_FEATURE (9)..(9): X is I, L or V
  MOD_RES (9)..(9): 4Abu
  MISC_FEATURE (10)..(10): X is I, L or V
  MISC_FEATURE (11)..(11): X is  C or S
  MISC_FEATURE (12)..(12): X is T or S
  MISC_FEATURE (13)..(13): X is A or G
  MISC_FEATURE (14)..(14): X is I, L or V
  MOD_RES (14)..(14): 4Abu
  MISC_FEATURE (15)..(15): X is I, L or V
  MISC_FEATURE (16)..(16): X is A or G
  MISC_FEATURE (17)..(17): X is A or G
  MISC_FEATURE (18)..(18): X is A or G
XXXXXXXXXXXXXXXXXX

SEQ ID NO: 122 - protein, 18 aa, Artificial
  peptide construct
  MISC_FEATURE (1)..(1): X is D and E for acidic amino acids
  MOD_RES (1)..(1): ACETYLATION
  MISC_FEATURE (2)..(2): X is A or G
  MISC_FEATURE (3)..(3): X is N or Q for amidated amino acids
  MISC_FEATURE (4)..(4): X is D and E for acidic amino acids
  MOD_RES (4)..(4): 4Abu
  MISC_FEATURE (5)..(5): X is D and E for acidic amino acids
  MISC_FEATURE (6)..(6): X is K, R or H for basic amino acids
  MISC_FEATURE (7)..(7): X is A or G
  MISC_FEATURE (8)..(8): X is A or G
  MISC_FEATURE (9)..(9): X is I, L or V
  MOD_RES (9)..(9): 4Abu
  MISC_FEATURE (10)..(10): X is I, L or V
  MISC_FEATURE (11)..(11): X is C or S
  MISC_FEATURE (12)..(12): X is T or S
  MISC_FEATURE (13)..(13): X is A or G
  MISC_FEATURE (14)..(14): X is I, L or V
  MOD_RES (14)..(14): 4Abu
  MISC_FEATURE (15)..(15): X is I, L or V
  MISC_FEATURE (16)..(16): X is A or G
  MISC_FEATURE (17)..(17): X is A or G
  MISC_FEATURE (18)..(18): X is A or G
XXXXXXXXXXXXXXXXXX

SEQ ID NO: 123 - protein, 17 aa, Artificial
  peptide construct
  MISC_FEATURE (1)..(1): X is I, L or V
  MOD_RES (1)..(1): ACETYLATION
  MOD_RES (1)..(1): 4Abu
  MISC_FEATURE (2)..(2): X is I, L or V
  MISC_FEATURE (3)..(3): X is F, W or Y for aromatic amino acids
  MISC_FEATURE (4)..(4): X is K, R or H for basic amino acids
  MISC_FEATURE (5)..(5): X is K, R or H for basic amino acids
  MISC_FEATURE (6)..(6): X is N or Q for amidated amino acids
  MISC_FEATURE (7)..(7): X is K, R or H for basic amino acids
  MISC_FEATURE (8)..(8): X is D and E for acidic amino acids
  MISC_FEATURE (9)..(9): X is K,  R or H for basic amino acids
  MISC_FEATURE (10)..(10): X is I, L or V
  MISC_FEATURE (11)..(11): X is A or G
  MISC_FEATURE (12)..(12): X is D and E for acidic amino acids
  MOD_RES (12)..(12): GAMMA-CARBOXYGLUTAMIC ACID HYDROXYLATION
  MISC_FEATURE (13)..(13): X is I, L or V
  MISC_FEATURE (14)..(14): X is D and E for acidic amino acids
  MISC_FEATURE (15)..(15): X is N or Q for amidated amino acids
  MISC_FEATURE (16)..(16): X is C or S
  MISC_FEATURE (17)..(17): X is D and E for acidic amino acids
XXXXXXXXXXXXXXXXX

SEQ ID NO: 124 - protein, 13 aa, Artificial
  peptide construct
  MISC_FEATURE (1)..(1): X is D and E for acidic amino acids
  MOD_RES (1)..(1): ACETYLATION
  MOD_RES (1)..(1): 4Abu
  MOD_RES (1)..(1): GAMMA-CARBOXYGLUTAMIC ACID HYDROXYLATION
  MISC_FEATURE (2)..(2): X is I, L or V
  MISC_FEATURE (3)..(3): X is I, L or V
  MISC_FEATURE (4)..(4): X is K, R or H for basic amino acids
  MISC_FEATURE (5)..(5): X is N or Q for amidated amino acids
  MISC_FEATURE (6)..(6): X is A or G
  MISC_FEATURE (7)..(7): X is D and E for acidic amino acids
  MISC_FEATURE (8)..(8): X is K, R or H for basic amino acids
  MISC_FEATURE (9)..(9): X is I, L or V
  MOD_RES (9)..(9): 4Abu
  MISC_FEATURE (10)..(10): X is D and E for acidic amino acids
  MISC_FEATURE (11)..(11): X is K, R or H for basic amino acids
  MISC_FEATURE (12)..(12): X is I, L or V
  MOD_RES (12)..(12): 4Abu
  MISC_FEATURE (13)..(13): X is D and E for acidic amino acids
XXXXXXXXXXXXX

SEQ ID NO: 125 - protein, 11 aa, Artificial
  peptide construct
  MISC_FEATURE (1)..(1): X is F or P
  MOD_RES (1)..(1): ACETYLATION
  MISC_FEATURE (2)..(2): X is C or S
  MISC_FEATURE (3)..(3): X is T or S
  MISC_FEATURE (4)..(4): X is K, R or H for basic amino acids
  MISC_FEATURE (5)..(5): X is I, L or V
  MOD_RES (5)..(5): 4Abu
  MOD_RES (5)..(5): GAMMA-CARBOXYGLUTAMIC ACID HYDROXYLATION
  MISC_FEATURE (6)..(6): X is I, L or V
  MISC_FEATURE (7)..(7): X is I, L or V
  MISC_FEATURE (8)..(8): X is T or S
  MISC_FEATURE (9)..(9): X is K, R or H for basic amino acids
  MISC_FEATURE (10)..(10): X is T or S
  MISC_FEATURE (11)..(11): X is I, L or V
XXXXXXXXXXX

SEQ ID NO: 126 - protein, 15 aa, Artificial
  Completely synthesized peptide construct
DFLPHYKNTSLGHRP

SEQ ID NO: 127 - protein, 15 aa, Artificial
  peptide construct
  MISC_FEATURE (1)..(1): X is D and E for acidic amino acids
  MOD_RES (1)..(1): ACETYLATION
  MISC_FEATURE (2)..(2): X is F, W or Y for aromatic amino acids
  MISC_FEATURE (3)..(3): X is I, L or V
  MISC_FEATURE (4)..(4): X is F or P
  MISC_FEATURE (5)..(5): X is K, R or H for basic amino acids
  MISC_FEATURE (6)..(6): X is F, W or Y for aromatic amino acids
  MISC_FEATURE (7)..(7): X is K, R or H for basic amino acids
  MISC_FEATURE (8)..(8): X is N or Q for amidated amino acids
  MISC_FEATURE (9)..(9): X is T or S
  MISC_FEATURE (10)..(10): X is  C or S
  MISC_FEATURE (11)..(11): X is I, L or V
  MISC_FEATURE (12)..(12): X is A  or G
  MISC_FEATURE (13)..(13): X is K, R or H for basic amino acids
  MISC_FEATURE (14)..(14): X is K, R or H for basic amino acids
  MISC_FEATURE (15)..(15): X is F or P
XXXXXXXXXXXXXXX

SEQ ID NO: 128 - protein, 9 aa, Artificial
  peptide construct
  MISC_FEATURE (1)..(1): X is A or G
  MOD_RES (1)..(1): ACETYLATION
  MISC_FEATURE (2)..(2): X is F, W or Y for aromatic amino acids
  MISC_FEATURE (3)..(3): X is M or Nle
  MISC_FEATURE (4)..(4): X is T or S
  MISC_FEATURE (5)..(5): X is M or Nle
  MISC_FEATURE (6)..(6): X is K, R or H for basic amino acids
  MISC_FEATURE (7)..(7): X is I, L or V
  MISC_FEATURE (8)..(8): X is K, R or H for basic amino acids
  MISC_FEATURE (9)..(9): X is N or Q for amidated amino acids
XXXXXXXXX

SEQ ID NO: 129 - protein, 31 aa, Artificial; identical to SEQ ID NO: 28
  Completely synthesized peptide construct

SEQ ID NO: 130 - protein, 31 aa, Artificial
  peptide construct
  MISC_FEATURE (1)..(1): X is D and E for acidic amino acids
  MOD_RES (1)..(1): ACETYLATION
  MISC_FEATURE (2)..(2): X is N or Q for amidated amino acids
  MISC_FEATURE (3)..(3): X is N or Q for amidated amino acids
  MISC_FEATURE (4)..(4): X is I, L or V
  MOD_RES (4)..(4): 4Abu
  MOD_RES (4)..(4): GAMMA-CARBOXYGLUTAMIC ACID HYDROXYLATION
  MISC_FEATURE (5)..(5): X is I, L or V
  MISC_FEATURE (6)..(6): X is D and E for acidic amino acids
  MISC_FEATURE (7)..(7): X is T or S
  MISC_FEATURE (8)..(8): X is C or S
  MISC_FEATURE (9)..(9): X is K, R or H for basic amino acids
  MISC_FEATURE (10)..(10): X is N or Q for amidated amino acids
  MISC_FEATURE (11)..(11): X is  D and E for acidic amino acids
  MISC_FEATURE (12)..(12): X is K, R or H for basic amino acids
  MISC_FEATURE (13)..(13): X is I, L or V
  MISC_FEATURE (14)..(14): X is K, R or H for basic amino acids
  MISC_FEATURE (15)..(15): X is N or Q for amidated amino acids
  MISC_FEATURE (16)..(16): X is K, R or H for basic amino acids
  MISC_FEATURE (17)..(17): X is K, R or H for basic amino acids
  MISC_FEATURE (18)..(18): X is  A or G
  MISC_FEATURE (19)..(19): X is N or Q for amidated amino acids
  MISC_FEATURE (20)..(20): X is A or G
  MISC_FEATURE (21)..(21): X is C or S
  MISC_FEATURE (22)..(22): X is C or S
  MISC_FEATURE (23)..(23): X is T or S
  MISC_FEATURE (24)..(24): X is K, R or H for basic amino acids
  MISC_FEATURE (25)..(25): X is F, W or Y for aromatic amino acids
  MISC_FEATURE (26)..(26): X is D and E for acidic amino acids
  MISC_FEATURE (27)..(27): X is A or G
  MISC_FEATURE (28)..(28): X is N or Q for amidated amino acids
  MISC_FEATURE (29)..(29): X is I,  L or V
  MISC_FEATURE (30)..(30): X is F or P
  MISC_FEATURE (31)..(31): X is C or S
XXXXXXXXXXXXXXXXXXXXXXXXXXXXXXX

SEQ ID NO: 131 - protein, 10 aa, Artificial
  peptide construct
  MISC_FEATURE (1)..(1): X is D and E for acidic amino acids
  MOD_RES (1)..(1): ACETYLATION
  MISC_FEATURE (2)..(2): X is N or Q for amidated amino acids
  MISC_FEATURE (3)..(3): X is T or S
  MISC_FEATURE (4)..(4): X is N or Q for amidated amino acids
  MISC_FEATURE (5)..(5): X is D and E for acidic amino acids
  MISC_FEATURE (6)..(6): X is T or S
  MISC_FEATURE (7)..(7): X is D and E for acidic amino acids
  MISC_FEATURE (8)..(8): X is A or G
  MISC_FEATURE (9)..(9): X is A or G
  MISC_FEATURE (10)..(10): X is C or S
XXXXXXXXXX

SEQ ID NO: 132 - protein, 9 aa, Artificial
  peptide construct
  MISC_FEATURE (1)..(1): X is I, L or V
  MOD_RES (1)..(1): ACETYLATION
  MISC_FEATURE (2)..(2): X is N or Q for amidated amino acids
  MISC_FEATURE (3)..(3): X is A or G
  MISC_FEATURE (4)..(4): X is D and E for acidic amino acids
  MOD_RES (4)..(4): 4Abu
  MISC_FEATURE (5)..(5): X is D and E for acidic amino acids
  MISC_FEATURE (6)..(6): X is C or S
  MISC_FEATURE (7)..(7): X is N or Q for amidated amino acids
  MISC_FEATURE (8)..(8): X is D and E for acidic amino acids
  MISC_FEATURE (9)..(9): X is K, R or H for basic amino acids
XXXXXXXXX

SEQ ID NO: 133 - protein, 16 aa, Artificial
  peptide construct
  MISC_FEATURE (1)..(1): X is D and E for acidic amino acids
  MOD_RES (1)..(1): ACETYLATION
  MOD_RES (1)..(1): 4Abu
  MOD_RES (1)..(1): GAMMA-CARBOXYGLUTAMIC ACID HYDROXYLATION
  MISC_FEATURE (2)..(2): X is I, L or V
  MISC_FEATURE (3)..(3): X is I, L or V
  MISC_FEATURE (4)..(4): X is K, R or H for basic amino acids
  MISC_FEATURE (5)..(5): X is N or Q for amidated amino acids
  MISC_FEATURE (6)..(6): X is A or G
  MISC_FEATURE (7)..(7): X is D and E for acidic amino acids
  MISC_FEATURE (8)..(8): X is K, R or H for basic amino acids
  MISC_FEATURE (9)..(9): X is I, L or V
  MOD_RES (9)..(9): 4Abu
  MISC_FEATURE (10)..(10): X is D and E for acidic amino acids
  MISC_FEATURE (11)..(11): X is K, R or H for basic amino acids
  MISC_FEATURE (12)..(12): X is I, L or V
  MOD_RES (12)..(12): 4Abu
  MISC_FEATURE (13)..(13): X is D and E for acidic amino acids
  MISC_FEATURE (14)..(14): X is A or G
  MISC_FEATURE (15)..(15): X is A or G
  MISC_FEATURE (16)..(16): X is A or G
XXXXXXXXXXXXXXXX

SEQ ID NO: 134 - protein, 4 aa, Artificial
  peptide construct
  MISC_FEATURE (1)..(1): X is A or G
  MOD_RES (1)..(1): ACETYLATION
  MISC_FEATURE (2)..(2): X is A or G
  MISC_FEATURE (3)..(3): X is A or G
  MISC_FEATURE (4)..(4): X is C or S
XXXX

SEQ ID NO: 135 - protein, 5 aa, Artificial
  peptide construct
  MISC_FEATURE (1)..(1): X is A or G
  MOD_RES (1)..(1): ACETYLATION
  MISC_FEATURE (2)..(2): X is A or G
  MISC_FEATURE (3)..(3): X is A or G
  MISC_FEATURE (4)..(4): X is C or S
  MISC_FEATURE (5)..(5): X is C or S
XXXXX

SEQ ID NO: 136 - protein, 5 aa, Artificial
  peptide construct
  MISC_FEATURE (1)..(1): X is A or G
  MOD_RES (1)..(1): ACETYLATION
  MISC_FEATURE (2)..(2): X is A or G
  MISC_FEATURE (3)..(3): X is A or G
  MISC_FEATURE (4)..(4): X is A or G
  MISC_FEATURE (5)..(5): X is C or S
XXXXX

SEQ ID NO: 137 - protein, 5 aa, Artificial
  peptide construct
  MISC_FEATURE (1)..(1): X is A or G
  MOD_RES (1)..(1): ACETYLATION
  MISC_FEATURE (2)..(2): X is A or G
  MISC_FEATURE (3)..(3): X is A or G
  MISC_FEATURE (4)..(4): X is A or G
  MISC_FEATURE (5)..(5): X is C or S
XXXXX

SEQ ID NO: 138 - protein, 8 aa, Artificial
  peptide construct
  MISC_FEATURE (1)..(1): X is A or G
  MOD_RES (1)..(1): ACETYLATION
  MISC_FEATURE (2)..(2): X is A or G
  MISC_FEATURE (3)..(3): X is A or G
  MISC_FEATURE (4)..(4): X is C or S
  MISC_FEATURE (5)..(5): X is A or G
  MISC_FEATURE (6)..(6): X is A or G
  MISC_FEATURE (7)..(7): X is A or G
  MISC_FEATURE (8)..(8): X is C or S
XXXXXXXX

SEQ ID NO: 139 - protein, 8 aa, Artificial
  peptide construct
  MISC_FEATURE (1)..(1): X is I, L or V
  MOD_RES (1)..(1): ACETYLATION
  MISC_FEATURE (2)..(2): X is K, R or H for basic amino acids
  MISC_FEATURE (3)..(3): X is A or G
  MISC_FEATURE (4)..(4): X is A or G
  MISC_FEATURE (5)..(5): X is A or G
  MISC_FEATURE (6)..(6): X is A or G
  MISC_FEATURE (7)..(7): X is C or S
  MISC_FEATURE (8)..(8): X is C or S
XXXXXXXX

SEQ ID NO: 140 - protein, 12 aa, Artificial
  peptide construct
  MISC_FEATURE (1)..(1): X is A or G
  MOD_RES (1)..(1): ACETYLATION
  MISC_FEATURE (2)..(2): X is A or G
  MISC_FEATURE (3)..(3): X is A or G
  MISC_FEATURE (4)..(4): X is C or S
  MISC_FEATURE (5)..(5): X is A or G
  MISC_FEATURE (6)..(6): X is T or S
  MISC_FEATURE (7)..(7): X is A or G
  MISC_FEATURE (8)..(8): X is C or S
  MISC_FEATURE (9)..(9): X is A or G
  MISC_FEATURE (10)..(10): X is C or S
  MISC_FEATURE (11)..(11): X is A or G
  MISC_FEATURE (12)..(12): X is C or S
XXXXXXXXXXXX

SEQ ID NO: 141 - protein, 58 aa, Artificial
  Completely synthesized peptide construct
DGQEEKAGVVSTGLIGGGDAEFRHDSGYEVHHQKLVFFAEDVGSNKGAIIGLMVGGVV

SEQ ID NO: 142 - protein, 58 aa, Artificial
  peptide construct
  MISC_FEATURE (1)..(1): X is D and E for acidic amino acids
  MISC_FEATURE (2)..(2): X is A or G
  MISC_FEATURE (3)..(3): X is N or Q for amidated amino acids
  MISC_FEATURE (4)..(4): X is D and E for acidic amino acids
  MISC_FEATURE (5)..(5): X is D and E for acidic amino acids
  MISC_FEATURE (6)..(6): X is K, R or H for basic amino acids
  MISC_FEATURE (7)..(7): X is A or G
  MISC_FEATURE (8)..(8): X is A or G
  MISC_FEATURE (9)..(9): X is I, L or V
  MISC_FEATURE (10)..(10): X is I, L or V
  MISC_FEATURE (11)..(11): X is C or S
  MISC_FEATURE (12)..(12): X is T or S
  MISC_FEATURE (13)..(13): X is A or G
  MISC_FEATURE (14)..(14): X is I, L or V
  MISC_FEATURE (15)..(15): X is I, L or V
  MISC_FEATURE (16)..(16): X is A or G
  MISC_FEATURE (17)..(17): X is A or G
  MISC_FEATURE (18)..(18): X is A or G
  MISC_FEATURE (19)..(19): X is D and E for acidic amino acids
  MISC_FEATURE (20)..(20): X is A or G
  MISC_FEATURE (21)..(21): X is D and E for acidic amino acids
  MISC_FEATURE (22)..(22): X is F, W or Y for aromatic amino acids
  MISC_FEATURE (23)..(23): X is K, R or H for basic amino acids
  MISC_FEATURE (24)..(24): X is K, R or H for basic amino acids
  MISC_FEATURE (25)..(25): X is D and E for acidic amino acids
  MISC_FEATURE (26)..(26): X is T or S
  MISC_FEATURE (27)..(27): X is A or G
  MISC_FEATURE (28)..(28): X is F, W or Y for aromatic amino acids
  MISC_FEATURE (29)..(29): X is D and E for acidic amino acids
  MISC_FEATURE (30)..(30): X is I, L or V
  MISC_FEATURE (31)..(31): X is K, R or H for basic amino acids
  MISC_FEATURE (32)..(32): X is K, R or H for basic amino acids
  MISC_FEATURE (33)..(33): X is N or Q for amidated amino acids
  MISC_FEATURE (34)..(34): X is K, R or H for basic amino acids
  MISC_FEATURE (35)..(35): X is I, L  or V
  MISC_FEATURE (36)..(36): X is I, L  or V
  MISC_FEATURE (37)..(37): X is F, W or Y for aromatic amino acids
  MISC_FEATURE (38)..(38): X is F, W or Y for aromatic amino acids
  MISC_FEATURE (39)..(39): X is A or G
  MISC_FEATURE (40)..(40): X is D and E for acidic amino acids
  MISC_FEATURE (41)..(41): X is D and E for acidic amino acids
  MISC_FEATURE (42)..(42): X is I, L or V
  MISC_FEATURE (43)..(43): X is A or G
  MISC_FEATURE (44)..(44): X is C or S
  MISC_FEATURE (45)..(45): X is N or Q for amidated amino acids
  MISC_FEATURE (46)..(46): X is K, R or H for basic amino acids
  MISC_FEATURE (47)..(47): X is A or G
  MISC_FEATURE (48)..(48): X is A or G
  MISC_FEATURE (49)..(49): X is I, L or V
  MISC_FEATURE (50)..(50): X is I, L or V
  MISC_FEATURE (51)..(51): X is A or G
  MISC_FEATURE (52)..(52): X is I, L or V
  MISC_FEATURE (53)..(53): X is M or Nle
  MISC_FEATURE (54)..(54): X is I, L or V
  MISC_FEATURE (55)..(55): X is A or G
  MISC_FEATURE (56)..(56): X is A or G
  MISC_FEATURE (57)..(57): X is I, L or V
  MISC_FEATURE (58)..(58): X is I, L or V
XXXXXXXXXXXXXXXXXXXXXXXXXXXXXXXXXXXXXXXXXXXXXXXXXXXXXXXXXX

SEQ ID NO: 143 - protein, 46 aa, Artificial
  Completely synthesized peptide construct
DGQEEKAGVVSTGLIGGGDAEFRHDSGYEVHHQKLVFFAENVGSNK

SEQ ID NO: 144 - protein, 46 aa, Artificial
  peptide construct
  MISC_FEATURE (1)..(1): X is D and E for acidic amino acids
  MISC_FEATURE (2)..(2): X is A or G
  MISC_FEATURE (3)..(3): X is N or Q for amidated amino acids
  MISC_FEATURE (4)..(4): X is D and E for acidic amino acids
  MISC_FEATURE (5)..(5): X is D and E for acidic amino acids
  MISC_FEATURE (6)..(6): X is K, R or H for basic amino acids
  MISC_FEATURE (7)..(7): X is A or G
  MISC_FEATURE (8)..(8): X is A or G
  MISC_FEATURE (9)..(9): X is I, L or V
  MISC_FEATURE (10)..(10): X is I, L or V
  MISC_FEATURE (11)..(11): X is C or S
  MISC_FEATURE (12)..(12): X is T or S
  MISC_FEATURE (13)..(13): X is A or G
  MISC_FEATURE (14)..(14): X is I, L or V
  MISC_FEATURE (15)..(15): X is I, L or V
  MISC_FEATURE (16)..(16): X is A or G
  MISC_FEATURE (17)..(17): X is A or G
  MISC_FEATURE (18)..(18): X is A or G
  MISC_FEATURE (19)..(19): X is D and E for acidic amino acids
  MISC_FEATURE (20)..(20): X is A or G
  MISC_FEATURE (21)..(21): X is D and E for acidic amino acids
  MISC_FEATURE (22)..(22): X is F, W or Y for aromatic amino acids
  MISC_FEATURE (23)..(23): X is K, R or H for basic amino acids
  MISC_FEATURE (24)..(24): X is K, R or H for basic amino acids
  MISC_FEATURE (25)..(25): X is D and E for basic amino acids
  MISC_FEATURE (26)..(26): X is T or S
  MISC_FEATURE (27)..(27): X is A or G
  MISC_FEATURE (28)..(28): X is F, W or Y for aromatic amino acids
  MISC_FEATURE (29)..(29): X is D and E for acidic amino acids
  MISC_FEATURE (30)..(30): X is I, L or V
  MISC_FEATURE (31)..(31): X is K, R or H for basic amino acids
  MISC_FEATURE (32)..(32): X is K, R or H for basic amino acids
  MISC_FEATURE (33)..(33): X is N or Q for amidated amino acids
  MISC_FEATURE (34)..(34): X is K, R or H for basic amino acids
  MISC_FEATURE (35)..(35): X is I, L or V
  MISC_FEATURE (36)..(36): X is I, L or V
  MISC_FEATURE (37)..(37): X is F, W or Y for aromatic amino acids
  MISC_FEATURE (38)..(38): X is F, W or Y for aromatic amino acids
  MISC_FEATURE (39)..(39): X is A or G
  MISC_FEATURE (40)..(40): X is D and E for acidic amino acids
  MISC_FEATURE (41)..(41): X is D and E for acidic amino acids
  MISC_FEATURE (42)..(42): X is I, L or V
  MISC_FEATURE (43)..(43): X is A or G
  MISC_FEATURE (44)..(44): X is C or S
  MISC_FEATURE (45)..(45): X is N or Q for amidated amino acids
  MISC_FEATURE (46)..(46): X is K, R or H for basic amino acids
XXXXXXXXXXXXXXXXXXXXXXXXXXXXXXXXXXXXXXXXXXXXXX

SEQ ID NO: 145 - protein, 48 aa, Artificial
  Completely synthesized peptide construct
DGQEEKAGVVSTGLIGGGDAEFRHDSGYEVHHQKLVFFAENVGSNKAI

SEQ ID NO: 146 - protein, 48 aa, Artificial
  peptide construct
  MISC_FEATURE (1)..(1): X is D and E for acidic amino acids
  MISC_FEATURE (2)..(2): X is A or G
  MISC_FEATURE (3)..(3): X is N or Q for amidated amino acids
  MISC_FEATURE (4)..(4): X is D and E for acidic amino acids
  MISC_FEATURE (5)..(5): X is D and E for acidic amino acids
  MISC_FEATURE (6)..(6): X is K, R or H for basic amino acids
  MISC_FEATURE (7)..(7): X is A or G
  MISC_FEATURE (8)..(8): X is A or G
  MISC_FEATURE (9)..(9): X is I, L or V
  MISC_FEATURE (10)..(10): X is I, L or V
  MISC_FEATURE (11)..(11): X is C or S
  MISC_FEATURE (12)..(12): X is T or S
  MISC_FEATURE (13)..(13): X is A or G
  MISC_FEATURE (14)..(14): X is I, L or V
  MISC_FEATURE (15)..(15): X is I, L or V
  MISC_FEATURE (16)..(16): X is A or G
  MISC_FEATURE (17)..(17): X is A or G
  MISC_FEATURE (18)..(18): X is A or G
  MISC_FEATURE (19)..(19): X is D and E for acidic amino acids
  MISC_FEATURE (20)..(20): X is A or G
  MISC_FEATURE (21)..(21): X is D and E for acidic amino acids
  MISC_FEATURE (22)..(22): X is F, W or Y for aromatic amino acids
  MISC_FEATURE (23)..(23): X is K, R or H for basic amino acids
  MISC_FEATURE (24)..(24): X is K, R or H for basic amino acids
  MISC_FEATURE (25)..(25): X is D and E for acidic amino acids
  MISC_FEATURE (26)..(26): X is T or S
  MISC_FEATURE (27)..(27): X is A or G
  MISC_FEATURE (28)..(28): X is F, W or Y for aromatic amino acids
  MISC_FEATURE (29)..(29): X is D and E for acidic amino acids
  MISC_FEATURE (30)..(30): X is I, L or V
  MISC_FEATURE (31)..(31): X is K, R or H for basic amino acids
  MISC_FEATURE (32)..(32): X is K, R or H for basic amino acids
  MISC_FEATURE (33)..(33): X is N or Q for amidated amino acids
  MISC_FEATURE (34)..(34): X is K, R or H for basic amino acids
  MISC_FEATURE (35)..(35): X is I, L or V
  MISC_FEATURE (36)..(36): X is I, L or V
  MISC_FEATURE (37)..(37): X is F, W or Y for aromatic amino acids
  MISC_FEATURE (38)..(38): X is F, W or Y for aromatic amino acids
  MISC_FEATURE (39)..(39): X is A or G
  MISC_FEATURE (40)..(40): X is Dand E for acidic amino acids
  MISC_FEATURE (41)..(41): X is Dand E for acidic amino acids
  MISC_FEATURE (42)..(42): X is I, L or V
  MISC_FEATURE (43)..(43): X is A or G
  MISC_FEATURE (44)..(44): X is C or S
  MISC_FEATURE (45)..(45): X is N or Q for amidated amino acids
  MISC_FEATURE (46)..(46): X is K, R or H for basic amino acids
  MISC_FEATURE (47)..(47): X is A or G
  MISC_FEATURE (48)..(48): X is I, L or V
XXXXXXXXXXXXXXXXXXXXXXXXXXXXXXXXXXXXXXXXXXXXXXXX

SEQ ID NO: 147 - protein, 29 aa, Artificial
  Completely synthesized peptide construct
DGQEEKAGVVSTGLIGGGDAEFRHDSGYE

SEQ ID NO: 148 - protein, 29 aa, Artificial
  peptide construct
  MISC_FEATURE (1)..(1): X is D and E for acidic amino acids
  MISC_FEATURE (2)..(2): X is A or G
  MISC_FEATURE (3)..(3): X is N or Q for amidated amino acids
  MISC_FEATURE (4)..(4): X is D and E for acidic amino acids
  MISC_FEATURE (5)..(5): X is D and E for acidic amino acids
  MISC_FEATURE (6)..(6): X is K, R or H for basic amino acids
  MISC_FEATURE (7)..(7): X is A or G
  MISC_FEATURE (8)..(8): X is A or G
  MISC_FEATURE (9)..(9): X is I, L or V
  MISC_FEATURE (10)..(10): X is I, L or V
  MISC_FEATURE (11)..(11): X is C or S
  MISC_FEATURE (12)..(12): X is T or S
  MISC_FEATURE (13)..(13): X is A or G
  MISC_FEATURE (14)..(14): X is I, L or V
  MISC_FEATURE (15)..(15): X is I, L or V
  MISC_FEATURE (16)..(16): X is A or G
  MISC_FEATURE (17)..(17): X is A or G
  MISC_FEATURE (18)..(18): X is A or G
  MISC_FEATURE (19)..(19): X is D and E for acidic amino acids
  MISC_FEATURE (20)..(20): X is A or G
  MISC_FEATURE (21)..(21): X is D and E for acidic amino acids
  MISC_FEATURE (22)..(22): X is F, W or Y for aromatic amino acids
  MISC_FEATURE (23)..(23): X is K, R or H for basic amino acids
  MISC_FEATURE (24)..(24): X is K, R or H for basic amino acids
  MISC_FEATURE (25)..(25): X is D and E for acidic amino acids
  MISC_FEATURE (26)..(26): X is  T or S
  MISC_FEATURE (27)..(27): X is A or G
  MISC_FEATURE (28)..(28): X is F, W or Y for aromatic amino acids
  MISC_FEATURE (29)..(29): X is D and E for acidic amino acids
XXXXXXXXXXXXXXXXXXXXXXXXXXXXX

SEQ ID NO: 149 - protein, 25 aa, Artificial
  Completely synthesized peptide construct
DGQEEKAGVVSTGLIGGGENVGSNK

SEQ ID NO: 150 - protein, 25 aa, Artificial
  peptide construct
  MISC_FEATURE (1)..(1): X is D and E for acidic amino acids
  MISC_FEATURE (2)..(2): X is A or G
  MISC_FEATURE (3)..(3): X is N or Q for amidated amino acids
  MISC_FEATURE (4)..(4): X is D and E for acidic amino acids
  MISC_FEATURE (5)..(5): X is D and E for acidic amino acids
  MISC_FEATURE (6)..(6): X is K, R or H for basic amino acids
  MISC_FEATURE (7)..(7): X is A or G
  MISC_FEATURE (8)..(8): X is A or G
  MISC_FEATURE (9)..(9): X is I, L or V
  MISC_FEATURE (10)..(10): X is I, L or V
  MISC_FEATURE (11)..(11): X is C or S
  MISC_FEATURE (12)..(12): X is T or S
  MISC_FEATURE (13)..(13): X is A or G
  MISC_FEATURE (14)..(14): X is I, L or V
  MISC_FEATURE (15)..(15): X is I, L or V
  MISC_FEATURE (16)..(16): X is A or G
  MISC_FEATURE (17)..(17): X is A or G
  MISC_FEATURE (18)..(18): X is A or G
  MISC_FEATURE (19)..(19): X is D and E for acidic amino acids
  MISC_FEATURE (20)..(20): X is D and E for acidic amino acids
  MISC_FEATURE (21)..(21): X is I, L or V
  MISC_FEATURE (22)..(22): X is A or G
  MISC_FEATURE (23)..(23): X is C or S
  MISC_FEATURE (24)..(24): X is N or Q for amidated amino acids
  MISC_FEATURE (25)..(25): X is K, R or H for basic amino acids
XXXXXXXXXXXXXXXXXXXXXXXXX

SEQ ID NO: 151 - protein, 30 aa, Artificial
  Completely synthesized peptide construct
DGQEEKAGVVSTGLIGGGDAEFRHDSGYEV

SEQ ID NO: 152 - protein, 30 aa, Artificial; identical to SEQ ID NO: 58
  peptide construct
  MISC_FEATURE (1)..(1): X is D and E for acidic amino acids
  MISC_FEATURE (2)..(2): X is A or G
  MISC_FEATURE (3)..(3): X is N or Q for amidated amino acids
  MISC_FEATURE (4)..(4): X is D and E for acidic amino acids
  MISC_FEATURE (5)..(5): X is D and E for acidic amino acids
  MISC_FEATURE (6)..(6): X is K, R or H for basic amino acids
  MISC_FEATURE (7)..(7): X is A or G
  MISC_FEATURE (8)..(8): X is A or G
  MISC_FEATURE (9)..(9): X is I, L or V
  MISC_FEATURE (10)..(10): X is I, L or V
  MISC_FEATURE (11)..(11): X is C or S
  MISC_FEATURE (12)..(12): X is T or S
  MISC_FEATURE (13)..(13): X is A or G
  MISC_FEATURE (14)..(14): X is I, L or V
  MISC_FEATURE (15)..(15): X is I, L or V
  MISC_FEATURE (16)..(16): X is A or G
  MISC_FEATURE (17)..(17): X is A or G
  MISC_FEATURE (18)..(18): X is A or G
  MISC_FEATURE (19)..(19): X is D and E for acidic amino acids
  MISC_FEATURE (20)..(20): X is A or G
  MISC_FEATURE (21)..(21): X is D and E for acidic amino acids
  MISC_FEATURE (22)..(22): X is F, W or Y for aromatic amino acids
  MISC_FEATURE (23)..(23): X is K, R or H for basic amino acids
  MISC_FEATURE (24)..(24): X is K, R or H for basic amino acids
  MISC_FEATURE (25)..(25): X is D and E for acidic amino acids
  MISC_FEATURE (26)..(26): X is T or S
  MISC_FEATURE (27)..(27): X is A or G
  MISC_FEATURE (28)..(28): X is F, W or Y for aromatic amino acids
  MISC_FEATURE (29)..(29): X is D and E for acidic amino acids
  MISC_FEATURE (30)..(30): X is I, L or V

SEQ ID NO: 153 - protein, 28 aa, Artificial
  Completely synthesized peptide construct
DGQEEKAGVVSTGLIGGGDAEFRHDSGY

SEQ ID NO: 154 - protein, 28 aa, Artificial
  peptide construct
  MISC_FEATURE (1)..(1): X is D and E for acidic amino acids
  MISC_FEATURE (2)..(2): X is A or G
  MISC_FEATURE (3)..(3): X is N or Q for amidated amino acids
  MISC_FEATURE (4)..(4): X is D and E for amidated amino acids
  MISC_FEATURE (5)..(5): X is D and E for amidated amino acids
  MISC_FEATURE (6)..(6): X is K, R or H for basic amino acids
  MISC_FEATURE (7)..(7): X is A or G
  MISC_FEATURE (8)..(8): X is A or G
  MISC_FEATURE (9)..(9): X is I, L or V
  MISC_FEATURE (10)..(10): X is I, L or V
  MISC_FEATURE (11)..(11): X is C or S
  MISC_FEATURE (12)..(12): X is T or S
  MISC_FEATURE (13)..(13): X is A or G
  MISC_FEATURE (14)..(14): X is I, L or V
  MISC_FEATURE (15)..(15): X is I, L or V
  MISC_FEATURE (16)..(16): X is A or G
  MISC_FEATURE (17)..(17): X is A or G
  MISC_FEATURE (18)..(18): X is A or G
  MISC_FEATURE (19)..(19): X is D and E for acidic amino acids
  MISC_FEATURE (20)..(20): X is A or G
  MISC_FEATURE (21)..(21): X is D and E for acidic amino acids
  MISC_FEATURE (22)..(22): X is F, W or Y for aromatic amino acids
  MISC_FEATURE (23)..(23): X is K, R or H for basic amino acids
  MISC_FEATURE (24)..(24): X is K, R or H for basic amino acids
  MISC_FEATURE (25)..(25): X is D and E for acidic amino acids
  MISC_FEATURE (26)..(26): X is T or S
  MISC_FEATURE (27)..(27): X is A or G
  MISC_FEATURE (28)..(28): X is F, W or Y for aromatic amino acids
XXXXXXXXXXXXXXXXXXXXXXXXXXXX

SEQ ID NO: 155 - protein, 22 aa, Artificial
  Completely synthesized peptide construct
DGQEEKAGVVSTGLIGGGEFRH

SEQ ID NO: 156 - protein, 22 aa, Artificial
  peptide construct
  MISC_FEATURE (1)..(1): X is D and E for acidic amino acids
  MISC_FEATURE (2)..(2): X is  A or G
  MISC_FEATURE (3)..(3): X is N or Q for aromatic amino acids
  MISC_FEATURE (4)..(4): X is D and E for acidic amino acids
  MISC_FEATURE (5)..(5): X is D and E for acidic amino acids
  MISC_FEATURE (6)..(6): X is K, R or H for basic amino acids
  MISC_FEATURE (7)..(7): X is A or G
  MISC_FEATURE (8)..(8): X is A or G
  MISC_FEATURE (9)..(9): X is I, L or V
  MISC_FEATURE (10)..(10): X is I, L or V
  MISC_FEATURE (11)..(11): X is C or S
  MISC_FEATURE (12)..(12): X is T or S
  MISC_FEATURE (13)..(13): X is A or G
  MISC_FEATURE (14)..(14): X is I, L or V
  MISC_FEATURE (15)..(15): X is I, L or V
  MISC_FEATURE (16)..(16): X is A or G
  MISC_FEATURE (17)..(17): X is A or G
  MISC_FEATURE (18)..(18): X is A or G
  MISC_FEATURE (19)..(19): X is D and E for acidic amino acids
  MISC_FEATURE (20)..(20): X is F or P
  MISC_FEATURE (21)..(21): X is K, R or H for basic amino acids
  MISC_FEATURE (22)..(22): X is K, R or H for basic amino acids
XXXXXXXXXXXXXXXXXXXXXX

SEQ ID NO: 157 - protein, 36 aa, Artificial
  Completely synthesized peptide construct
DGQEEKAGVVSTGLIGGGSAFDVLSFTAEEKAGVYK

SEQ ID NO: 158 - protein, 37 aa, Artificial
  peptide construct
  MISC_FEATURE (1)..(1): X is D and E for acidic amino acids
  MISC_FEATURE (2)..(2): X is A or G
  MISC_FEATURE (3)..(3): X is N or Q for amidated amino acids
  MISC_FEATURE (4)..(4): X is D and E for acidic amino acids
  MISC_FEATURE (5)..(5): X is D and E for acidic amino acids
  MISC_FEATURE (6)..(6): X is K, R or H for basic amino acids
  MISC_FEATURE (7)..(7): X is A or G
  MISC_FEATURE (8)..(8): X is A or G
  MISC_FEATURE (9)..(9): X is I, L or V
  MISC_FEATURE (10)..(10): X is I, L or V
  MISC_FEATURE (11)..(11): X is C or S
  MISC_FEATURE (12)..(12): X is T or S
  MISC_FEATURE (13)..(13): X is A or G
  MISC_FEATURE (14)..(14): X is I, L or V
  MISC_FEATURE (15)..(15): X is I, L or V
  MISC_FEATURE (16)..(16): X is A or G
  MISC_FEATURE (17)..(17): X is A or G
  MISC_FEATURE (18)..(18): X is A or G
  MISC_FEATURE (19)..(19): X is D and E for acidic amino acids
  MISC_FEATURE (20)..(20): X is C or S
  MISC_FEATURE (21)..(21): X is A or G
  MISC_FEATURE (22)..(22): X is F, W or Y for aromatic amino acids
  MISC_FEATURE (23)..(23): X is D and E for acidic amino acids
  MISC_FEATURE (24)..(24): X is I, L or V
  MISC_FEATURE (25)..(25): X is I, L or V
  MISC_FEATURE (26)..(26): X is C or S
  MISC_FEATURE (27)..(27): X is F, W or Y for aromatic amino acids
  MISC_FEATURE (28)..(28): X is T or S
  MISC_FEATURE (29)..(29): X is A or G
  MISC_FEATURE (30)..(30): X is D and E for acidic amino acids
  MISC_FEATURE (31)..(31): X is D and E for acidic amino acids
  MISC_FEATURE (32)..(32): X is K, R or H for basic amino acids
  MISC_FEATURE (33)..(33): X is A or G
  MISC_FEATURE (34)..(34): X is A or G
  MISC_FEATURE (35)..(35): X is I, L or V
  MISC_FEATURE (36)..(36): X is F, W or Y for aromatic amino acids
  MISC_FEATURE (37)..(37): X is K, R or H for basic amino acids
XXXXXXXXXXXXXXXXXXXXXXXXXXXXXXXXXXXXX

SEQ ID NO: 159 - protein, 18 aa, Artificial
  Completely synthesized peptide construct
DGQEEKAGVVSTGLIGGG

SEQ ID NO: 160 - protein, 32 aa, Artificial
  peptide construct
  MISC_FEATURE (1)..(1): X is D and E for acidic amino acids
  MISC_FEATURE (2)..(2): X is A or G
  MISC_FEATURE (3)..(3): X is N or Q for amidated amino acids
  MISC_FEATURE (4)..(4): X is D and E for acidic amino acids
  MISC_FEATURE (5)..(5): X is D and E for acidic amino acids
  MISC_FEATURE (6)..(6): X is K, R or H for basic amino acids
  MISC_FEATURE (7)..(7): X is A or G
  MISC_FEATURE (8)..(8): X is A or G
  MISC_FEATURE (9)..(9): X is I, L or V
  MISC_FEATURE (10)..(10): X is I, L or V
  MISC_FEATURE (11)..(11): X is C or S
  MISC_FEATURE (12)..(12): X is T or S
  MISC_FEATURE (13)..(13): X is A or G
  MISC_FEATURE (14)..(14): X is I, L or V
  MISC_FEATURE (15)..(15): X is I, L or V
  MISC_FEATURE (16)..(16): X is A or G
  MISC_FEATURE (17)..(17): X is A or G
  MISC_FEATURE (18)..(18): X is A or G
  MOD_RES (19)..(19): ACETYLATION
  MISC_FEATURE (19)..(19): X is C or S
  MISC_FEATURE (20)..(20): X is I, L or V
  MISC_FEATURE (21)..(21): X is K, R or H for basic amino acids
  MISC_FEATURE (22)..(22): X is I, L or V
  MISC_FEATURE (23)..(23): X is M or Nle
  MISC_FEATURE (24)..(24): X is A or G
  MISC_FEATURE (25)..(25): X is T or S
  MISC_FEATURE (26)..(26): X is I, L or V
  MISC_FEATURE (27)..(27): X is F or P
  MISC_FEATURE (28)..(28): X is C or S
  MISC_FEATURE (29)..(29): X is T or S
  MISC_FEATURE (30)..(30): X is F, W or Y for aromatic amino acids
  MISC_FEATURE (31)..(31): X is A or G
  MISC_FEATURE (32)..(32): X is C or S
XXXXXXXXXXXXXXXXXXXXXXXXXXXXXXXX

SEQ ID NO: 161 - protein, 18 aa, Artificial
  Completely synthesized peptide construct
DGQEEKAGVVSTGLIGGG

SEQ ID NO: 162 - protein, 32 aa, Artificial; identical to SEQ ID NO: 160
  peptide construct
  MISC_FEATURE (1)..(1): X is D and E for acidic amino acids
  MISC_FEATURE (2)..(2): X is A or G
  MISC_FEATURE (3)..(3): X is N or Q for amidated amino acids
  MISC_FEATURE (4)..(4): X is D and E for acidic amino acids
  MISC_FEATURE (5)..(5): X is D and E for acidic amino acids
  MISC_FEATURE (6)..(6): X is K, R or H for basic amino acids
  MISC_FEATURE (7)..(7): X is A or G
  MISC_FEATURE (8)..(8): X is A or G
  MISC_FEATURE (9)..(9): X is I, L or V
  MISC_FEATURE (10)..(10): X is I, L or V
  MISC_FEATURE (11)..(11): X is C or S
  MISC_FEATURE (12)..(12): X is T or S
  MISC_FEATURE (13)..(13): X is A or G
  MISC_FEATURE (14)..(14): X is I, L or V
  MISC_FEATURE (15)..(15): X is I, L or V
  MISC_FEATURE (16)..(16): X is A or G
  MISC_FEATURE (17)..(17): X is A or G
  MISC_FEATURE (18)..(18): X is A or G
  MISC_FEATURE (19)..(19): X is C or S
  MISC_FEATURE (20)..(20): X is I, L or V
  MISC_FEATURE (21)..(21): X is K, R or H for basic amino acids
  MISC_FEATURE (22)..(22): X is I, L or V
  MISC_FEATURE (23)..(23): X is M or Nle
  MISC_FEATURE (24)..(24): X is A or G
  MISC_FEATURE (25)..(25): X is T or S
  MISC_FEATURE (26)..(26): X is I, L or V
  MISC_FEATURE (27)..(27): X is F or P
  MISC_FEATURE (28)..(28): X is C or S
  MISC_FEATURE (29)..(29): X is C or S
  MISC_FEATURE (30)..(30): X is F, W or Y for aromatic amino acids
  MISC_FEATURE (31)..(31): X is A or G
  MISC_FEATURE (32)..(32): X is T or S

SEQ ID NO: 163 - protein, 29 aa, Artificial
  Completely synthesized peptide construct
DGQEEKAGVVSTGLIGGGNITEIADLTQK

SEQ ID NO: 164 - protein, 29 aa, Artificial
  peptide construct
  MISC_FEATURE (1)..(1): X is D and E for acidic amino acids
  MISC_FEATURE (2)..(2): X is A or G
  MISC_FEATURE (3)..(3): X is N or Q for amidated amino acids
  MISC_FEATURE (4)..(4): X is D and E for acidic amino acids
  MISC_FEATURE (5)..(5): X is D and E for acidic amino acids
  MISC_FEATURE (6)..(6): X is K, R or H for basic amino acids
  MISC_FEATURE (7)..(7): X is A or G
  MISC_FEATURE (8)..(8): X is A or G
  MISC_FEATURE (9)..(9): X is I, L or V
  MISC_FEATURE (10)..(10): X is I, L or V
  MISC_FEATURE (11)..(11): X is C or S
  MISC_FEATURE (12)..(12): X is T or S
  MISC_FEATURE (13)..(13): X is A or G
  MISC_FEATURE (14)..(14): X is I, L or V
  MISC_FEATURE (15)..(15): X is I, L or V
  MISC_FEATURE (16)..(16): X is A or G
  MISC_FEATURE (17)..(17): X is A or G
  MISC_FEATURE (18)..(18): X is A or G
  MISC_FEATURE (19)..(19): X is N or Q for amidated amino acids
  MISC_FEATURE (20)..(20): X is I, L or V
  MISC_FEATURE (21)..(21): X is T or S
  MISC_FEATURE (22)..(22): X is D and E for acidic amino acids
  MISC_FEATURE (23)..(23): X is I, L or V
  MISC_FEATURE (24)..(24): X is A or G
  MISC_FEATURE (25)..(25): X is D and E for acidic amino acids
  MISC_FEATURE (26)..(26): X is I, L or V
  MISC_FEATURE (27)..(27): X is T or S
  MISC_FEATURE (28)..(28): X is N or Q for amidated amino acids
  MISC_FEATURE (29)..(29): X is K, R or H for basic amino acids
XXXXXXXXXXXXXXXXXXXXXXXXXXXXX

SEQ ID NO: 165 - protein, 58 aa, Artificial
  Completely synthesized peptide construct
DGQEEKAGVVSTGLIGGGNMYAMMIARFKMFPEVKEKGMAALPRLIAFTSEHSHFSLK

SEQ ID NO: 166 - protein, 58 aa, Artificial; identical to SEQ ID NO: 142
  peptide construct
  MISC_FEATURE (1)..(1): X is D and E for acidic amino acids
  MISC_FEATURE (2)..(2): X is A or G
  MISC_FEATURE (3)..(3): X is N or Q for amidated amino acids
  MISC_FEATURE (4)..(4): X is D and E for acidic amino acids
  MISC_FEATURE (5)..(5): X is D and E for acidic amino acids
  MISC_FEATURE (6)..(6): X is K, R or H for basic amino acids
  MISC_FEATURE (7)..(7): X is A or G
  MISC_FEATURE (8)..(8): X is A or G
  MISC_FEATURE (9)..(9): X is I, L or V
  MISC_FEATURE (10)..(10): X is I, L or V
  MISC_FEATURE (11)..(11): X is C or S
  MISC_FEATURE (12)..(12): X is T or S
  MISC_FEATURE (13)..(13): X is A or G
  MISC_FEATURE (14)..(14): X is I, L or V
  MISC_FEATURE (15)..(15): X is I, L or V
  MISC_FEATURE (16)..(16): X is A or G
  MISC_FEATURE (17)..(17): X is A or G
  MISC_FEATURE (18)..(18): X is A or G
  MISC_FEATURE (19)..(19): X is N or Q for amidated amino acids
  MISC_FEATURE (20)..(20): X is M or Nle
  MISC_FEATURE (21)..(21): X is F, W or Y for aromatic amino acids
  MISC_FEATURE (22)..(22): X is A or G
  MISC_FEATURE (23)..(23): X is M or Nle
  MISC_FEATURE (24)..(24): X is M or Nle
  MISC_FEATURE (25)..(25): X is I, L or V
  MISC_FEATURE (26)..(26): X is A or G
  MISC_FEATURE (27)..(27): X is K, R or H for basic amino acids
  MISC_FEATURE (28)..(28): X is F, W or Y for aromatic amino acids
  MISC_FEATURE (29)..(29): X is K, R or H for basic amino acids
  MISC_FEATURE (30)..(30): X is M or Nle
  MISC_FEATURE (31)..(31): X is F, W or Y for aromatic amino acids
  MISC_FEATURE (32)..(32): X is F or P
  MISC_FEATURE (33)..(33): X is D and E for acidic amino acids
  MISC_FEATURE (34)..(34): X is I, L or V
  MISC_FEATURE (35)..(35): X is K, R or H for basic amino acids
  MISC_FEATURE (36)..(36): X is D and E for acidic amino acids
  MISC_FEATURE (37)..(37): X is K, R or H for basic amino acids
  MISC_FEATURE (38)..(38): X is A or G
  MISC_FEATURE (39)..(39): X is M or Nle
  MISC_FEATURE (40)..(40): X is A or G
  MISC_FEATURE (41)..(41): X is A or G
  MISC_FEATURE (42)..(42): X is I, L or V
  MISC_FEATURE (43)..(43): X is F or P
  MISC_FEATURE (44)..(44): X is K, R or H for basic amino acids
  MISC_FEATURE (45)..(45): X is I, L or V
  MISC_FEATURE (46)..(46): X is I, L or V
  MISC_FEATURE (47)..(47): X is A or G
  MISC_FEATURE (48)..(48): X is F, W or Y for aromatic amino acids
  MISC_FEATURE (49)..(49): X is T or S
  MISC_FEATURE (50)..(50): X is C or S
  MISC_FEATURE (51)..(51): X is D and E for acidic amino acids
  MISC_FEATURE (52)..(52): X is K, R or H for basic amino acids
  MISC_FEATURE (53)..(53): X is C or S
  MISC_FEATURE (54)..(54): X is K, R or H for basic amino acids
  MISC_FEATURE (55)..(55): X is F, W or Y for aromatic amino acids
  MISC_FEATURE (56)..(56): X is C or S
  MISC_FEATURE (57)..(57): X is I, L or V
  MISC_FEATURE (58)..(58): X is K, R or H for basic amino acids

SEQ ID NO: 167 - protein, 51 aa, Artificial
  Completely synthesized peptide construct
DGQEEKAGVVSTGLIGGGIARFKMFPEVKEKGMAALPRLIATSEHSHFSLK

SEQ ID NO: 168 - protein, 52 aa, Artificial
  peptide construct
  MISC_FEATURE (1)..(1): X is D and E for acidic amino acids
  MISC_FEATURE (2)..(2): X is A or G
  MISC_FEATURE (3)..(3): X is N or Q for aromatic amino acids
  MISC_FEATURE (4)..(4): X is D and E for acidic amino acids
  MISC_FEATURE (5)..(5): X is D and E for acidic amino acids
  MISC_FEATURE (6)..(6): X is K, R or H for basic amino acids
  MISC_FEATURE (7)..(7): X is A or G
  MISC_FEATURE (8)..(8): X is A or G
  MISC_FEATURE (9)..(9): X is I, L or V
  MISC_FEATURE (10)..(10): X is I, L or V
  MISC_FEATURE (11)..(11): X is C or S
  MISC_FEATURE (12)..(12): X is T or S
  MISC_FEATURE (13)..(13): X is A or G
  MISC_FEATURE (14)..(14): X is I, L or V
  MISC_FEATURE (15)..(15): X is I, L or V
  MISC_FEATURE (16)..(16): X is A or G
  MISC_FEATURE (17)..(17): X is A or G
  MISC_FEATURE (18)..(18): X is A or G
  MISC_FEATURE (19)..(19): X is I, L or V
  MISC_FEATURE (20)..(20): X is A or G
  MISC_FEATURE (21)..(21): X is K, R or H for basic amino acids
  MISC_FEATURE (22)..(22): X is F, W or Y for aromatic amino acids
  MISC_FEATURE (23)..(23): X is K, R or H for basic amino acids
  MISC_FEATURE (24)..(24): X is M or Nle
  MISC_FEATURE (25)..(25): X is F, W or Y for aromatic amino acids
  MISC_FEATURE (26)..(26): X is F or P
  MISC_FEATURE (27)..(27): X is D and E for acidic amino acids
  MISC_FEATURE (28)..(28): X is I, L or V
  MISC_FEATURE (29)..(29): X is K, R or H basic amino acids
  MISC_FEATURE (30)..(30): X is D and E for acidic amino acids
  MISC_FEATURE (31)..(31): X is D and E for acidic amino acids
  MISC_FEATURE (32)..(32): X is A or G
  MISC_FEATURE (33)..(33): X is M or Nle
  MISC_FEATURE (34)..(34): X is  A or G
  MISC_FEATURE (35)..(35): X is  A or G
  MISC_FEATURE (36)..(36): X is I, L or V
  MISC_FEATURE (37)..(37): X is F or P
  MISC_FEATURE (38)..(38): X is K, R or H for basic amino acids
  MISC_FEATURE (39)..(39): X is I, L or V
  MISC_FEATURE (40)..(40): X is I, L or V
  MISC_FEATURE (41)..(41): X is A or G
  MISC_FEATURE (42)..(42): X is F, W or Y for aromatic amino acids
  MISC_FEATURE (43)..(43): X is T or S
  MISC_FEATURE (44)..(44): X is C or S
  MISC_FEATURE (45)..(45): X is D and  E for acidic amino acids
  MISC_FEATURE (46)..(46): X is K, R or H basic amino acids
  MISC_FEATURE (47)..(47): X is C or S
  MISC_FEATURE (48)..(48): X is K, R or H basic amino acids
  MISC_FEATURE (49)..(49): X is F, W or Y for aromatic amino acids
  MISC_FEATURE (50)..(50): X is C or S
  MISC_FEATURE (51)..(51): X is I, L or V
  MISC_FEATURE (52)..(52): X is K, R or H basic amino acids
XXXXXXXXXXXXXXXXXXXXXXXXXXXXXXXXXXXXXXXXXXXXXXXXXXXX

SEQ ID NO: 169 - protein, 38 aa, Artificial
  Completely synthesized peptide construct
DGQEEKAGVVSTGLIGGGSRLSKVAPVIKARMMEYGTT

SEQ ID NO: 170 - protein, 38 aa, Artificial
  peptide construct
  MISC_FEATURE (1)..(1): X is D and E for acidic amino acids
  MISC_FEATURE (2)..(2): X is A or G
  MISC_FEATURE (3)..(3): X is N or Q for amidated amino acids
  MISC_FEATURE (4)..(4): X is D and E for acidic amino acids
  MISC_FEATURE (5)..(5): X is D and E for acidic amino acids
  MISC_FEATURE (6)..(6): X is K, R or H for basic amino acids
  MISC_FEATURE (7)..(7): X is A or G
  MISC_FEATURE (8)..(8): X is A or G
  MISC_FEATURE (9)..(9): X is I, L or V
  MISC_FEATURE (10)..(10): X is I, L or V
  MISC_FEATURE (11)..(11): X is C or S
  MISC_FEATURE (12)..(12): X is T or S
  MISC_FEATURE (13)..(13): X is A or G
  MISC_FEATURE (14)..(14): X is I, L or V
  MISC_FEATURE (15)..(15): X is I, L or V
  MISC_FEATURE (16)..(16): X is A  or G
  MISC_FEATURE (17)..(17): X is A  or G
  MISC_FEATURE (18)..(18): X is A  or G
  MISC_FEATURE (19)..(19): X is C or S
  MISC_FEATURE (20)..(20): X is K, R or H for basic amino acids
  MISC_FEATURE (21)..(21): X is I, L or V
  MISC_FEATURE (22)..(22): X is C or S
  MISC_FEATURE (23)..(23): X is K, R or H for basic amino acids
  MISC_FEATURE (24)..(24): X is I, L or V
  MISC_FEATURE (25)..(25): X is A or G
  MISC_FEATURE (26)..(26): X is F or P
  MISC_FEATURE (27)..(27): X is I, L or V
  MISC_FEATURE (28)..(28): X is I, L or V
  MISC_FEATURE (29)..(29): X is K, R or H for basic amino acids
  MISC_FEATURE (30)..(30): X is A or G
  MISC_FEATURE (31)..(31): X is K, R or H for basic amino acids
  MISC_FEATURE (32)..(32): X is M or Nle
  MISC_FEATURE (33)..(33): X is M or Nle
  MISC_FEATURE (34)..(34): X is D and E for acidic amino acids
  MISC_FEATURE (35)..(35): X is F, W or Y for aromatic amino acids
  MISC_FEATURE (36)..(36): X is A or G
  MISC_FEATURE (37)..(37): X is T or S
  MISC_FEATURE (38)..(38): X is T or S
XXXXXXXXXXXXXXXXXXXXXXXXXXXXXXXXXXXXXX

SEQ ID NO: 171 - protein, 37 aa, Artificial
  Completely synthesized peptide construct
DGQEEKAGVVSTGLIGGGIPPSLRYLEDEERMSRLSK

SEQ ID NO: 172 - protein, 36 aa, Artificial
  peptide construct
  MISC_FEATURE (1)..(1): X is D and E for acidic amino acids
  MISC_FEATURE (2)..(2): X is A or G
  MISC_FEATURE (3)..(3): X is N or Q for aromatic amino acids
  MISC_FEATURE (4)..(4): X is D and E for acidic amino acids
  MISC_FEATURE (5)..(5): X is D and E for acidic amino acids
  MISC_FEATURE (6)..(6): X is K, R or H for basic amino acids
  MISC_FEATURE (7)..(7): X is A or G
  MISC_FEATURE (8)..(8): X is A or G
  MISC_FEATURE (9)..(9): X is I, L or V
  MISC_FEATURE (10)..(10): X is I, L or V
  MISC_FEATURE (11)..(11): X is C or S
  MISC_FEATURE (12)..(12): X is T or S
  MISC_FEATURE (13)..(13): X is A or G
  MISC_FEATURE (14)..(14): X is I, L or V
  MISC_FEATURE (15)..(15): X is I, L or V
  MISC_FEATURE (16)..(16): X is A or G
  MISC_FEATURE (17)..(17): X is A or G
  MISC_FEATURE (18)..(18): X is A or G
  MISC_FEATURE (19)..(19): X is I, L or V
  MISC_FEATURE (20)..(20): X is F or P
  MISC_FEATURE (21)..(21): X is F or P
  MISC_FEATURE (22)..(22): X is C or S
  MISC_FEATURE (23)..(23): X is I, L or V
  MISC_FEATURE (24)..(24): X is K, R or H for basic amino acids
  MISC_FEATURE (25)..(25): X is F, W or Y for aromatic amino acids
  MISC_FEATURE (26)..(26): X is D and E for acidic amino acids
  MISC_FEATURE (27)..(27): X is D and E for acidic amino acids
  MISC_FEATURE (28)..(28): X is D and E for acidic amino acids
  MISC_FEATURE (29)..(29): X is D and E for acidic amino acids
  MISC_FEATURE (30)..(30): X is K, R or H for basic amino acids
  MISC_FEATURE (31)..(31): X is M or Nle
  MISC_FEATURE (32)..(32): X is  C or S
  MISC_FEATURE (33)..(33): X is K, R or H for basic amino acids
  MISC_FEATURE (34)..(34): X is I, L or V
  MISC_FEATURE (35)..(35): X is C or S
  MISC_FEATURE (36)..(36): X is K, R or H for basic amino acids
XXXXXXXXXXXXXXXXXXXXXXXXXXXXXXXXXXXX

SEQ ID NO: 173 - protein, 38 aa, Artificial
  Completely synthesized peptide construct
DGQEEKAGVVSTGLIGGGNTNMFTYEIAPVFVLLEYVT

SEQ ID NO: 174 - protein, 38 aa, Artificial; identical to SEQ ID NO: 170
  peptide construct
  MISC_FEATURE (1)..(1): X is D and E for acidic amino acids
  MISC_FEATURE (2)..(2): X is A or G
  MISC_FEATURE (3)..(3): X is N or Q for amidated amino acids
  MISC_FEATURE (4)..(4): X is D and E for acidic amino acids
  MISC_FEATURE (5)..(5): X is D and E for acidic amino acids
  MISC_FEATURE (6)..(6): X is K, R or H for basic amino acids
  MISC_FEATURE (7)..(7): X is  A or G
  MISC_FEATURE (8)..(8): X is  A or G
  MISC_FEATURE (9)..(9): X is I, L or V
  MISC_FEATURE (10)..(10): X is I, L or V
  MISC_FEATURE (11)..(11): X is C or S
  MISC_FEATURE (12)..(12): X is T or S
  MISC_FEATURE (13)..(13): X is A or G
  MISC_FEATURE (14)..(14): X is I, L or V
  MISC_FEATURE (15)..(15): X is I, L or V
  MISC_FEATURE (16)..(16): X is A or G
  MISC_FEATURE (17)..(17): X is A or G
  MISC_FEATURE (18)..(18): X is A or G
  MISC_FEATURE (19)..(19): X is N or Q for amidated amino acids
  MISC_FEATURE (20)..(20): X is T or S
  MISC_FEATURE (21)..(21): X is N or Q for aromatic amino acids
  MISC_FEATURE (22)..(22): X is M or Nle
  MISC_FEATURE (23)..(23): X is F, W or Y for aromatic amino acids
  MISC_FEATURE (24)..(24): X is T or S
  MISC_FEATURE (25)..(25): X is F, W or Y for aromatic amino acids
  MISC_FEATURE (26)..(26): X is D and E for acidic amino acids
  MISC_FEATURE (27)..(27): X is I, L or V
  MISC_FEATURE (28)..(28): X is A or G
  MISC_FEATURE (29)..(29): X is F or P
  MISC_FEATURE (30)..(30): X is I, L or V
  MISC_FEATURE (31)..(31): X is F, W or Y for aromatic amino acids
  MISC_FEATURE (32)..(32): X is I, L or V
  MISC_FEATURE (33)..(33): X is I, L or V
  MISC_FEATURE (34)..(34): X is I, L or V
  MISC_FEATURE (35)..(35): X is D and E for acidic amino acids
  MISC_FEATURE (36)..(36): X is F, W or Y for aromatic amion acids
  MISC_FEATURE (37)..(37): X is I, L or V
  MISC_FEATURE (38)..(38): X is T or S

SEQ ID NO: 175 - protein, 33 aa, Artificial
  Completely synthesized peptide construct
DGQEEKAGVVSTGLIGGGFKADEKKFWGKYLYE

SEQ ID NO: 176 - protein, 33 aa, Artificial; identical to SEQ ID NO: 99
  peptide construct
  MISC_FEATURE (1)..(1): X is D and E for acidic amino acids
  MISC_FEATURE (2)..(2): X is A or G
  MISC_FEATURE (3)..(3): X is N or Q for amidated amino acids
  MISC_FEATURE (4)..(4): X is D and E for acidic amino acids
  MISC_FEATURE (5)..(5): X is D and E for acidic amino acids
  MISC_FEATURE (6)..(6): X is K, R or H for basic amino acids
  MISC_FEATURE (7)..(7): X is A or G
  MISC_FEATURE (8)..(8): X is A or G
  MISC_FEATURE (9)..(9): X is I, L or V
  MISC_FEATURE (10)..(10): X is I, L or V
  MISC_FEATURE (11)..(11): X is C or S
  MISC_FEATURE (12)..(12): X is T or S
  MISC_FEATURE (13)..(13): X is A or G
  MISC_FEATURE (14)..(14): X is I, L or V
  MISC_FEATURE (15)..(15): X is I, L or V
  MISC_FEATURE (16)..(16): X is A or G
  MISC_FEATURE (17)..(17): X is A or G
  MISC_FEATURE (18)..(18): X is A or G
  MISC_FEATURE (19)..(19): X is F, W or Y for aromatic amino acids
  MISC_FEATURE (20)..(20): X is K, R or H for basic amino acids
  MISC_FEATURE (21)..(21): X is  A or G
  MISC_FEATURE (22)..(22): X is D and E for acidic amino acids
  MISC_FEATURE (23)..(23): X is D and E for acidic amino acids
  MISC_FEATURE (24)..(24): X is K, R or H for basic amino acids
  MISC_FEATURE (25)..(25): X is K, R or H for basic amino acids
  MISC_FEATURE (26)..(26): X is F, W or Y for aromatic amino acids
  MISC_FEATURE (27)..(27): X is F, W or Y for aromatic amino acids
  MISC_FEATURE (28)..(28): X is A or G
  MISC_FEATURE (29)..(29): X is K, R or H for basic amino acids
  MISC_FEATURE (30)..(30): X is F, W or Y for aromatic amino acids
  MISC_FEATURE (31)..(31): X is I, L or V
  MISC_FEATURE (32)..(32): X is F, W or Y for aromatic amino acids
  MISC_FEATURE (33)..(33): X is D and E for acidic amino acids

SEQ ID NO: 177 - protein, 33 aa, Artificial
  Completely synthesized peptide construct
DGQEEKAGVVSTGLIGGGSHLVEALYLVCGERG

SEQ ID NO: 178 - protein, 32 aa, Artificial; identical to SEQ ID NO: 160
  peptide construct
  MISC_FEATURE (1)..(1): X is D and E for acidic amino acids
  MISC_FEATURE (2)..(2): X is A or G
  MISC_FEATURE (3)..(3): X is N or Q for amidated amino acids
  MISC_FEATURE (4)..(4): X is D and E for acidic amino acids
  MISC_FEATURE (5)..(5): X is D and E for acidic amino acids
  MISC_FEATURE (6)..(6): X is K, R or H for basic amino acids
  MISC_FEATURE (7)..(7): X is A or G
  MISC_FEATURE (8)..(8): X is A or G
  MISC_FEATURE (9)..(9): X is I, L or V
  MISC_FEATURE (10)..(10): X is I, L or V
  MISC_FEATURE (11)..(11): X is C or S
  MISC_FEATURE (12)..(12): X is T or S
  MISC_FEATURE (13)..(13): X is A or G
  MISC_FEATURE (14)..(14): X is I, L or V
  MISC_FEATURE (15)..(15): X is I, L or V
  MISC_FEATURE (16)..(16): X is A or G
  MISC_FEATURE (17)..(17): X is A or G
  MISC_FEATURE (18)..(18): X is A or G
  MISC_FEATURE (19)..(19): X is C or S
  MISC_FEATURE (20)..(20): X is K, R or H for basic amino acids
  MISC_FEATURE (21)..(21): X is I, L or V
  MISC_FEATURE (22)..(22): X is I, L or V
  MISC_FEATURE (23)..(23): X is D and E for acidic amino acids
  MISC_FEATURE (24)..(24): X is A or G
  MISC_FEATURE (25)..(25): X is I, L or V
  MISC_FEATURE (26)..(26): X is F, W or Y for aromatic amino acids
  MISC_FEATURE (27)..(27): X is I, L or V
  MISC_FEATURE (28)..(28): X is C or S
  MISC_FEATURE (29)..(29): X is A or G
  MISC_FEATURE (30)..(30): X is D and E for acidic amino acids
  MISC_FEATURE (31)..(31): X is K, R or H for basic amino acids
  MISC_FEATURE (32)..(32): X is A or G

SEQ ID NO: 179 - protein, 42 aa, Artificial
  Completely synthesized peptide construct
DGQEEKAGVVSTGLIGGGVLGGGCALLRCIPALDSLTPANED

SEQ ID NO: 180 - protein, 42 aa, Artificial
  peptide construct
  MISC_FEATURE (1)..(1): X is D and E for acidic amino acids
  MISC_FEATURE (2)..(2): X is A or G
  MISC_FEATURE (3)..(3): X is N or Q for amidated amino acids
  MISC_FEATURE (4)..(4): X is D and E for acidic amino acids
  MISC_FEATURE (5)..(5): X is D and E for acidic amino acids
  MISC_FEATURE (6)..(6): X is K, R or H for basic amino acids
  MISC_FEATURE (7)..(7): X is A or G
  MISC_FEATURE (8)..(8): X is A or G
  MISC_FEATURE (9)..(9): X is I, L or V
  MISC_FEATURE (10)..(10): X is I, L or V
  MISC_FEATURE (11)..(11): X is C or S
  MISC_FEATURE (12)..(12): X is T or S
  MISC_FEATURE (13)..(13): X is A or G
  MISC_FEATURE (14)..(14): X is I, L or V
  MISC_FEATURE (15)..(15): X is I, L or V
  MISC_FEATURE (16)..(16): X is A or G
  MISC_FEATURE (17)..(17): X is A or G
  MISC_FEATURE (18)..(18): X is A or G
  MISC_FEATURE (19)..(19): X is I, L or V
  MISC_FEATURE (20)..(20): X is I, L or V
  MISC_FEATURE (21)..(21): X is A or G
  MISC_FEATURE (22)..(22): X is A or G
  MISC_FEATURE (23)..(23): X is A or G
  MISC_FEATURE (24)..(24): X is C or S
  MISC_FEATURE (25)..(25): X is A or G
  MISC_FEATURE (26)..(26): X is I, L or V
  MISC_FEATURE (27)..(27): X is I, L or V
  MISC_FEATURE (28)..(28): X is K, R or H for basic amino acids
  MISC_FEATURE (29)..(29): X is C  or S
  MISC_FEATURE (30)..(30): X is I, L or V
  MISC_FEATURE (31)..(31): X is F or P
  MISC_FEATURE (32)..(32): X is A or G
  MISC_FEATURE (33)..(33): X is I, L or V
  MISC_FEATURE (34)..(34): X is D and E for acidic amino acids
  MISC_FEATURE (35)..(35): X is C or S
  MISC_FEATURE (36)..(36): X is I, L or V
  MISC_FEATURE (37)..(37): X is T or S
  MISC_FEATURE (38)..(38): X is F or P
  MISC_FEATURE (39)..(39): X is A or G
  MISC_FEATURE (40)..(40): X is N or Q for amidated amino acids
  MISC_FEATURE (41)..(41): X is D and E for acidic amino acids
  MISC_FEATURE (42)..(42): X is D and E for acidic amino acids
XXXXXXXXXXXXXXXXXXXXXXXXXXXXXXXXXXXXXXXXXX

SEQ ID NO: 181 - protein, 46 aa, Artificial
  Completely synthesized peptide construct
DGQEEKAGVVSTGLIGGGEACVTSWLWSGEGAVFYRVDLHFINLGT

SEQ ID NO: 182 - protein, 46 aa, Artificial; identical to SEQ ID NO: 144
  peptide construct
  MISC_FEATURE (1)..(1): X is D and E for acidic amino acids
  MISC_FEATURE (2)..(2): X is A or G
  MISC_FEATURE (3)..(3): X is N or Q for amidated amino acids
  MISC_FEATURE (4)..(4): X is D and E for acidic amino acids
  MISC_FEATURE (5)..(5): X is D and E for acidic amino acids
  MISC_FEATURE (6)..(6): X is K, R or H for basic amino acids
  MISC_FEATURE (7)..(7): X is A or G
  MISC_FEATURE (8)..(8): X is A or G
  MISC_FEATURE (9)..(9): X is I, L or V
  MISC_FEATURE (10)..(10): X is I, L or V
  MISC_FEATURE (11)..(11): X is C or S
  MISC_FEATURE (12)..(12): X is T or S
  MISC_FEATURE (13)..(13): X is A or G
  MISC_FEATURE (14)..(14): X is I, L or V
  MISC_FEATURE (15)..(15): X is I, L or V
  MISC_FEATURE (16)..(16): X is A or G
  MISC_FEATURE (17)..(17): X is A or G
  MISC_FEATURE (18)..(18): X is A or G
  MISC_FEATURE (19)..(19): X is D and E for acidic amino acids
  MISC_FEATURE (20)..(20): X is A or G
  MISC_FEATURE (21)..(21): X is C or S
  MISC_FEATURE (22)..(22): X is I, L or V
  MISC_FEATURE (23)..(23): X is T or S
  MISC_FEATURE (24)..(24): X is C or S
  MISC_FEATURE (25)..(25): X is F, W or Y for aromatic amino acids
  MISC_FEATURE (26)..(26): X is I, L or V
  MISC_FEATURE (27)..(27): X is F, W or Y for aromatic amino acids
  MISC_FEATURE (28)..(28): X is C or S
  MISC_FEATURE (29)..(29): X is A or G
  MISC_FEATURE (30)..(30): X is D and E for acidic amino acids
  MISC_FEATURE (31)..(31): X is A or G
  MISC_FEATURE (32)..(32): X is A or G
  MISC_FEATURE (33)..(33): X is I, L or V
  MISC_FEATURE (34)..(34): X is F, W or Y for aromatic amino acids
  MISC_FEATURE (35)..(35): X is F, W or Y for aromatic amino acids
  MISC_FEATURE (36)..(36): X is K, R or H for basic amino acids
  MISC_FEATURE (37)..(37): X is I, L or V
  MISC_FEATURE (38)..(38): X is D and E for acidic amino acids
  MISC_FEATURE (39)..(39): X is I, L or V
  MISC_FEATURE (40)..(40): X is K, R or H for basic amino acids
  MISC_FEATURE (41)..(41): X is F, W or Y for aromatic amino acids
  MISC_FEATURE (42)..(42): X is I, L or V
  MISC_FEATURE (43)..(43): X is N or Q for amidated amino acids
  MISC_FEATURE (44)..(44): X is I, L or V
  MISC_FEATURE (45)..(45): X is A or G
  MISC_FEATURE (46)..(46): X is T or S

SEQ ID NO: 183 - protein, 39 aa, Artificial
  Completely synthesized peptide construct
DGQEEKAGVVSTGLIGGGMDFWCVEHDRPPPATPTSLTT

SEQ ID NO: 184 - protein, 39 aa, Artificial
  peptide construct
  MISC_FEATURE (1)..(1): X is D and E for acidic amino acids
  MISC_FEATURE (2)..(2): X is A or G
  MISC_FEATURE (3)..(3): X is N or Q for amidated amino acids
  MISC_FEATURE (4)..(4): X is D and E for acidic amino acids
  MISC_FEATURE (5)..(5): X is D and E for acidic amino acids
  MISC_FEATURE (6)..(6): X is K, R or H for basic amino acids
  MISC_FEATURE (7)..(7): X is  A or G
  MISC_FEATURE (8)..(8): X is  A or G
  MISC_FEATURE (9)..(9): X is I, L or V
  MISC_FEATURE (10)..(10): X is I, L or V
  MISC_FEATURE (11)..(11): X is C or S
  MISC_FEATURE (12)..(12): X is T or S
  MISC_FEATURE (13)..(13): X is A or G
  MISC_FEATURE (14)..(14): X is I, L or V
  MISC_FEATURE (15)..(15): X is I, L or V
  MISC_FEATURE (16)..(16): X is A or G
  MISC_FEATURE (17)..(17): X is A or G
  MISC_FEATURE (18)..(18): X is A or G
  MISC_FEATURE (19)..(19): X is M or Nle
  MISC_FEATURE (20)..(20): X is D and E for acidic amino acids
  MISC_FEATURE (21)..(21): X is F, W or Y for aromatic amino acids
  MISC_FEATURE (22)..(22): X is F, W or Y for aromatic amino acids
  MISC_FEATURE (23)..(23): X is C or S
  MISC_FEATURE (24)..(24): X is I, L or V
  MISC_FEATURE (25)..(25): X is D and E for acidic amino acids
  MISC_FEATURE (26)..(26): X is K, R or H for basic amino acids
  MISC_FEATURE (27)..(27): X is D and E for acidic amino acids
  MISC_FEATURE (28)..(28): X is K, R or H for basic amino acids
  MISC_FEATURE (29)..(29): X is F or P
  MISC_FEATURE (30)..(30): X is F or P
  MISC_FEATURE (31)..(31): X is F or P
  MISC_FEATURE (32)..(32): X is A  or G
  MISC_FEATURE (33)..(33): X is T or S
  MISC_FEATURE (34)..(34): X is F or P
  MISC_FEATURE (35)..(35): X is T or S
  MISC_FEATURE (36)..(36): X is C or S
  MISC_FEATURE (37)..(37): X is I, L or V
  MISC_FEATURE (38)..(38): X is T or S
  MISC_FEATURE (39)..(39): X is T or S
XXXXXXXXXXXXXXXXXXXXXXXXXXXXXXXXXXXXXXX

SEQ ID NO: 185 - protein, 38 aa, Artificial
  Completely synthesized peptide construct
DGQEEKAGVVSTGLIGGGNMYAMMIARFKMFPEVKEKG

SEQ ID NO: 186 - protein, 38 aa, Artificial; identical to SEQ ID NO: 170
  peptide construct
  MISC_FEATURE (1)..(1): X is D and E for acidic amino acids
  MISC_FEATURE (2)..(2): X is A or G
  MISC_FEATURE (3)..(3): X is N or Q for amidated amino acids
  MISC_FEATURE (4)..(4): X is D and E for acidic amino acids
  MISC_FEATURE (5)..(5): X is D and E for acidic amino acids
  MISC_FEATURE (6)..(6): X is K, R or H for basic amino acids
  MISC_FEATURE (7)..(7): X is A or G
  MISC_FEATURE (8)..(8): X is A or G
  MISC_FEATURE (9)..(9): X is I, L or V
  MISC_FEATURE (10)..(10): X is I, L or V
  MISC_FEATURE (11)..(11): X is C or S
  MISC_FEATURE (12)..(12): X is T or S
  MISC_FEATURE (13)..(13): X is A or G
  MISC_FEATURE (14)..(14): X is I, L or V
  MISC_FEATURE (15)..(15): X is I, L or V
  MISC_FEATURE (16)..(16): X is A or G
  MISC_FEATURE (17)..(17): X is A or G
  MISC_FEATURE (18)..(18): X is A or G
  MISC_FEATURE (19)..(19): X is N or Q for amidated amino acids
  MISC_FEATURE (20)..(20): X is M or Nle
  MISC_FEATURE (21)..(21): X is F, W or Y for aromatic amino acids
  MISC_FEATURE (22)..(22): X is A or G
  MISC_FEATURE (23)..(23): X is M or Nle
  MISC_FEATURE (24)..(24): X is M or Nle
  MISC_FEATURE (25)..(25): X is I, L or V
  MISC_FEATURE (26)..(26): X is A or G
  MISC_FEATURE (27)..(27): X is K, R or H for basic amino acids
  MISC_FEATURE (28)..(28): X is F, W or Y for aromatic amino acids
  MISC_FEATURE (29)..(29): X is K, R or H for basic amino acids
  MISC_FEATURE (30)..(30): X is M or Nle
  MISC_FEATURE (31)..(31): X is F, W or Y for aromatic amino acids
  MISC_FEATURE (32)..(32): X is F or P
  MISC_FEATURE (33)..(33): X is D and E for acidic amino acids
  MISC_FEATURE (34)..(34): X is I, L or V
  MISC_FEATURE (35)..(35): X is K, R or H for basic amino acids
  MISC_FEATURE (36)..(36): X is D and E for acidic amino acids
  MISC_FEATURE (37)..(37): X is K, R or H for basic amino acids
  MISC_FEATURE (38)..(38): X is A or G

SEQ ID NO: 187 - protein, 51 aa, Artificial
  Completely synthesized peptide construct
DGQEEKAGVVSTGLIGGGNMYAMMIARFKMFPEVKEKGMAALPRLIAFTSE

SEQ ID NO: 188 - protein, 51 aa, Artificial
  peptide construct
  MISC_FEATURE (1)..(1): X is D and E for acidic amino acids
  MISC_FEATURE (2)..(2): X is A or G
  MISC_FEATURE (3)..(3): X is N or Q for amidated amino acids
  MISC_FEATURE (4)..(4): X is D and E for acidic amino acids
  MISC_FEATURE (5)..(5): X is D and E for acidic amino acids
  MISC_FEATURE (6)..(6): X is K, R or H for basic amino acids
  MISC_FEATURE (7)..(7): X is A or G
  MISC_FEATURE (8)..(8): X is A or G
  MISC_FEATURE (9)..(9): X is I, L or V
  MISC_FEATURE (10)..(10): X is I, L or V
  MISC_FEATURE (11)..(11): X is C or S
  MISC_FEATURE (12)..(12): X is T or S
  MISC_FEATURE (13)..(13): X is A or G
  MISC_FEATURE (14)..(14): X is I, L or V
  MISC_FEATURE (15)..(15): X is I, L or V
  MISC_FEATURE (16)..(16): X is A or G
  MISC_FEATURE (17)..(17): X is A or G
  MISC_FEATURE (18)..(18): X is A or G
  MISC_FEATURE (19)..(19): X is N or Q for amidated amino acids
  MISC_FEATURE (20)..(20): X is M or Nle
  MISC_FEATURE (21)..(21): X is F, W or Y for aromatic amino acids
  MISC_FEATURE (22)..(22): X is A or G
  MISC_FEATURE (23)..(23): X is M or Nle
  MISC_FEATURE (24)..(24): X is M or Nle
  MISC_FEATURE (25)..(25): X is I, L or V
  MISC_FEATURE (26)..(26): X is A or G
  MISC_FEATURE (27)..(27): X is K, R or H for basic amino acids
  MISC_FEATURE (28)..(28): X is F, W or Y for aromatic amino acids
  MISC_FEATURE (29)..(29): X is K, R or H for basic amino acids
  MISC_FEATURE (30)..(30): X is M or Nle
  MISC_FEATURE (31)..(31): X is F, W or Y for aromatic amino acids
  MISC_FEATURE (32)..(32): X is F or P
  MISC_FEATURE (33)..(33): X is D and E for acidic amino acids
  MISC_FEATURE (34)..(34): X is I, L or V
  MISC_FEATURE (35)..(35): X is K, R or H for basic amino acids
  MISC_FEATURE (36)..(36): X is D and E for acidic amino acids
  MISC_FEATURE (37)..(37): X is K, R or H for basic amino acids
  MISC_FEATURE (38)..(38): X is A or G
  MISC_FEATURE (39)..(39): X is M or Nle
  MISC_FEATURE (40)..(40): X is A or G
  MISC_FEATURE (41)..(41): X is A or G
  MISC_FEATURE (42)..(42): X is I, L or V
  MISC_FEATURE (43)..(43): X is F or P
  MISC_FEATURE (44)..(44): X is K, R or H for basic amino acids
  MISC_FEATURE (45)..(45): X is I, L or V
  MISC_FEATURE (46)..(46): X is I, L or V
  MISC_FEATURE (47)..(47): X is A or G
  MISC_FEATURE (48)..(48): X is F, W or Y for aromatic amino acids
  MISC_FEATURE (49)..(49): X is T or S
  MISC_FEATURE (50)..(50): X is C or S
  MISC_FEATURE (51)..(51): X is D and E for acidic amino acids
XXXXXXXXXXXXXXXXXXXXXXXXXXXXXXXXXXXXXXXXXXXXXXXXXXX

SEQ ID NO: 189 - protein, 31 aa, Artificial
  Completely synthesized peptide construct
DGQEEKAGVVSTGLIGGGIAFTSEHSHFSLK

SEQ ID NO: 190 - protein, 31 aa, Artificial; identical to SEQ ID NO: 130
  peptide construct
  MISC_FEATURE (1)..(1): X is D and E for acidic amino acids
  MISC_FEATURE (2)..(2): X is A or G
  MISC_FEATURE (3)..(3): X is N or Q for amidated amino acids
  MISC_FEATURE (4)..(4): X is D and E for acidic amino acids
  MISC_FEATURE (5)..(5): X is D and E for acidic amino acids
  MISC_FEATURE (6)..(6): X is K, R or H for basic amino acids
  MISC_FEATURE (7)..(7): X is A or G
  MISC_FEATURE (8)..(8): X is A or G
  MISC_FEATURE (9)..(9): X is I, L or V
  MISC_FEATURE (10)..(10): X is I, L or V
  MISC_FEATURE (11)..(11): X is C or S
  MISC_FEATURE (12)..(12): X is T or S
  MISC_FEATURE (13)..(13): X is A or G
  MISC_FEATURE (14)..(14): X is I, L or V
  MISC_FEATURE (15)..(15): X is I, L or V
  MISC_FEATURE (16)..(16): X is A or G
  MISC_FEATURE (17)..(17): X is A or G
  MISC_FEATURE (18)..(18): X is A or G
  MISC_FEATURE (19)..(19): X is I, L or V
  MISC_FEATURE (20)..(20): X is A or G
  MISC_FEATURE (21)..(21): X is F, W or Y for aromatic amino acids
  MISC_FEATURE (22)..(22): X is T or S
  MISC_FEATURE (23)..(23): X is C or S
  MISC_FEATURE (24)..(24): X is D and E for acidic amino acids
  MISC_FEATURE (25)..(25): X is K, R or H for basic amino acids
  MISC_FEATURE (26)..(26): X is C or S
  MISC_FEATURE (27)..(27): X is K, R or H for basic amino acids
  MISC_FEATURE (28)..(28): X is F, W or Y for aromatic amino acids
  MISC_FEATURE (29)..(29): X is C or S
  MISC_FEATURE (30)..(30): X is I, L or V
  MISC_FEATURE (31)..(31): X is K, R or H for basic amino acids

SEQ ID NO: 191 - protein, 39 aa, Artificial; identical to SEQ ID NO: 183
  Completely synthesized peptide construct

SEQ ID NO: 192 - protein, 39 aa, Artificial; identical to SEQ ID NO: 184
  peptide construct
  MISC_FEATURE (1)..(1): X is D and E for acicid amino acids
  MISC_FEATURE (2)..(2): X is A or G
  MISC_FEATURE (3)..(3): X is N or Q for amidated amino acids
  MISC_FEATURE (4)..(4): X is D and E for acidic amino acids
  MISC_FEATURE (5)..(5): X is D and E for acidic amino acids
  MISC_FEATURE (6)..(6): X is K, R or H for basic amino acids
  MISC_FEATURE (7)..(7): X is A or G
  MISC_FEATURE (8)..(8): X is A or G
  MISC_FEATURE (9)..(9): X is I, L or V
  MISC_FEATURE (10)..(10): X is I, L or V
  MISC_FEATURE (11)..(11): X is C or S
  MISC_FEATURE (12)..(12): X is T or S
  MISC_FEATURE (13)..(13): X is A or G
  MISC_FEATURE (14)..(14): X is I, L or V
  MISC_FEATURE (15)..(15): X is I, L or V
  MISC_FEATURE (16)..(16): X is A or G
  MISC_FEATURE (17)..(17): X is A or G
  MISC_FEATURE (18)..(18): X is A or G
  MISC_FEATURE (19)..(19): X is M or Nle
  MISC_FEATURE (20)..(20): X is D and E for acidic amino acids
  MISC_FEATURE (21)..(21): X is F, W or Y for aromatic amino acids
  MISC_FEATURE (22)..(22): X is F, W or Y for aromatic amino acids
  MISC_FEATURE (23)..(23): X is C or S
  MISC_FEATURE (24)..(24): X is I, L or V
  MISC_FEATURE (25)..(25): X is D and E for acidic amino acids
  MISC_FEATURE (26)..(26): X is K, R or H for basic amino acids
  MISC_FEATURE (27)..(27): X is D and E for acidic amino acids
  MISC_FEATURE (28)..(28): X is K, R or H for basic amino acids
  MISC_FEATURE (29)..(29): X is F or P
  MISC_FEATURE (30)..(30): X is F or P
  MISC_FEATURE (31)..(31): X is F or P
  MISC_FEATURE (32)..(32): X is A or G
  MISC_FEATURE (33)..(33): X is T or S
  MISC_FEATURE (34)..(34): X is F or P
  MISC_FEATURE (35)..(35): X is T or S
  MISC_FEATURE (36)..(36): X is C or S
  MISC_FEATURE (37)..(37): X is I, L or V
  MISC_FEATURE (38)..(38): X is T or S
  MISC_FEATURE (39)..(39): X is T or S

SEQ ID NO: 193 - protein, 28 aa, Artificial
  Completely synthesized peptide construct
DGQEEKAGVVSTGLIGGGERPTLAFLQD

SEQ ID NO: 194 - protein, 28 aa, Artificial
  peptide construct
  MISC_FEATURE (1)..(1): X is D and E for acidic amino acids
  MISC_FEATURE (2)..(2): X is A or G
  MISC_FEATURE (3)..(3): X is N or Q for amidated amino acids
  MISC_FEATURE (4)..(4): X is D and E for acidic amino acids
  MISC_FEATURE (5)..(5): X is D and E for acidic amino acids
  MISC_FEATURE (6)..(6): X is K, R or H for basic amino acids
  MISC_FEATURE (7)..(7): X is A or G
  MISC_FEATURE (8)..(8): X is A or G
  MISC_FEATURE (9)..(9): X is I, L or V
  MISC_FEATURE (10)..(10): X is I, L or V
  MISC_FEATURE (11)..(11): X is C or S
  MISC_FEATURE (12)..(12): X is T or S
  MISC_FEATURE (13)..(13): X is A or G
  MISC_FEATURE (14)..(14): X is I, L or V
  MISC_FEATURE (15)..(15): X is I, L or V
  MISC_FEATURE (16)..(16): X is A or G
  MISC_FEATURE (17)..(17): X is A or G
  MISC_FEATURE (18)..(18): X is A or G
  MISC_FEATURE (19)..(19): X is D and E for acidic amino acids
  MISC_FEATURE (20)..(20): X is K, R or H for basic amino acids
  MISC_FEATURE (21)..(21): X is F or P
  MISC_FEATURE (22)..(22): X is T or S
  MISC_FEATURE (23)..(23): X is I, L or V
  MISC_FEATURE (24)..(24): X is A or G
  MISC_FEATURE (25)..(25): X is F, W or Y for aromatic amino acids
  MISC_FEATURE (26)..(26): X is I, L or V
  MISC_FEATURE (27)..(27): X is N or Q for amidated amino acids
  MISC_FEATURE (28)..(28): X is D and E for acidic amino acids
XXXXXXXXXXXXXXXXXXXXXXXXXXXX

SEQ ID NO: 195 - protein, 28 aa, Artificial
  Completely synthesized peptide construct
DGQEEKAGVVSTGLIGGGDRSTKVIDFH

SEQ ID NO: 196 - protein, 28 aa, Artificial
  peptide construct
  MISC_FEATURE (1)..(1): X is D and E for acidic amino acids
  MISC_FEATURE (2)..(2): X is A or G
  MISC_FEATURE (3)..(3): X is N or Q for amidated amino acids
  MISC_FEATURE (4)..(4): X is D and E for acidic amino acids
  MISC_FEATURE (5)..(5): X is D and E for acidic amino acids
  MISC_FEATURE (6)..(6): X is K, R or H for basic amino acids
  MISC_FEATURE (7)..(7): X is A or G
  MISC_FEATURE (8)..(8): X is A or G
  MISC_FEATURE (9)..(9): X is I, L or V
  MISC_FEATURE (10)..(10): X is I, L or V
  MISC_FEATURE (11)..(11): X is C or S
  MISC_FEATURE (12)..(12): X is  Tor S
  MISC_FEATURE (13)..(13): X is A or G
  MISC_FEATURE (14)..(14): X is I, L or V
  MISC_FEATURE (15)..(15): X is I, L or V
  MISC_FEATURE (16)..(16): X is A or G
  MISC_FEATURE (17)..(17): X is A or G
  MISC_FEATURE (18)..(18): X is A or G
  MISC_FEATURE (19)..(19): X is D and E for acidic amino acids
  MISC_FEATURE (20)..(20): X is K, R or H for basic amino acids
  MISC_FEATURE (21)..(21): X is C or S
  MISC_FEATURE (22)..(22): X is T or S
  MISC_FEATURE (23)..(23): X is K, R or H for basic amino acids
  MISC_FEATURE (24)..(24): X is I, L or V
  MISC_FEATURE (25)..(25): X is I, L or V
  MISC_FEATURE (26)..(26): X is D and E for acidic amino acids
  MISC_FEATURE (27)..(27): X is F, W or Y for aromatic amino acids
  MISC_FEATURE (28)..(28): X is K, R or H for basic amino acids
XXXXXXXXXXXXXXXXXXXXXXXXXXXX

SEQ ID NO: 197 - protein, 31 aa, Artificial
  Completely synthesized peptide construct
DGQEEKAGVVSTGLIGGGIAGFKGEQGPKGE

SEQ ID NO: 198 - protein, 31 aa, Artificial; identical to SEQ ID NO: 130
  peptide construct
  MISC_FEATURE (1)..(1): X is D and E for acidic amino acids
  MISC_FEATURE (2)..(2): X is A or G
  MISC_FEATURE (3)..(3): X is N or Q for amidated amino acids
  MISC_FEATURE (4)..(4): X is D and E for acidic amino acids
  MISC_FEATURE (5)..(5): X is D and E for acidic amino acids
  MISC_FEATURE (6)..(6): X is K, R or H for basic amino acids
  MISC_FEATURE (7)..(7): X is A or G
  MISC_FEATURE (8)..(8): X is A or G
  MISC_FEATURE (9)..(9): X is I, L or V
  MISC_FEATURE (10)..(10): X is I, L or V
  MISC_FEATURE (11)..(11): X is C or S
  MISC_FEATURE (12)..(12): X is T or S
  MISC_FEATURE (13)..(13): X is A or G
  MISC_FEATURE (14)..(14): X is I, L or V
  MISC_FEATURE (15)..(15): X is I, L or V
  MISC_FEATURE (16)..(16): X is A or G
  MISC_FEATURE (17)..(17): X is A or G
  MISC_FEATURE (18)..(18): X is A or G
  MISC_FEATURE (19)..(19): X is I, L or V
  MISC_FEATURE (20)..(20): X is A or G
  MISC_FEATURE (21)..(21): X is A or G
  MISC_FEATURE (22)..(22): X is F, W or Y for aromatic amino acids
  MISC_FEATURE (23)..(23): X is K, R or H for basic amino acids
  MISC_FEATURE (24)..(24): X is A or G
  MISC_FEATURE (25)..(25): X is D and E for acidic amino acids
  MISC_FEATURE (26)..(26): X is N or Q for amidated amino acids
  MISC_FEATURE (27)..(27): X is A or G
  MISC_FEATURE (28)..(28): X is F or P
  MISC_FEATURE (29)..(29): X is K, R or H for basic amino acids
  MISC_FEATURE (30)..(30): X is A or G
  MISC_FEATURE (31)..(31): X is D and E for acidic amino acids

SEQ ID NO: 199 - protein, 1 aa, Artificial
  Completely synthesized peptide construct
  MISC_FEATURE (1)..(1): X is TEST TEST TEST TEST TEST
X

SEQ ID NO: 200 - protein, 18 aa, Artificial
  peptide construct
  MISC_FEATURE (1)..(1): X is D and E for acidic amino acids
  MISC_FEATURE (2)..(2): X is A or G
  MISC_FEATURE (3)..(3): X is N or Q for amidated amino acids
  MISC_FEATURE (4)..(4): X is D and E for acidic amino acids
  MISC_FEATURE (5)..(5): X is D and E for acidic amino acids
  MISC_FEATURE (6)..(6): X is K, R or H for basic amino acids
  MISC_FEATURE (7)..(7): X is A or G
  MISC_FEATURE (8)..(8): X is A or G
  MISC_FEATURE (9)..(9): X is I, L or V
  MISC_FEATURE (10)..(10): X is I, L or V
  MISC_FEATURE (11)..(11): X is C or S
  MISC_FEATURE (12)..(12): X is T or S
  MISC_FEATURE (13)..(13): X is A or G
  MISC_FEATURE (14)..(14): X is I, L or V
  MISC_FEATURE (15)..(15): X is I, L or V
  MISC_FEATURE (16)..(16): X is A or G
  MISC_FEATURE (17)..(17): X is A or G
  MISC_FEATURE (18)..(18): X is A or G
XXXXXXXXXXXXXXXXXX

SEQ ID NO: 201 - protein, 26 aa, Artificial
  Completely synthesized peptide construct
DGQEEKAGVVSTGLIGGGKNIVTPRT

SEQ ID NO: 202 - protein, 26 aa, Artificial
  peptide construct
  MISC_FEATURE (1)..(1): X is D and E for acidic amino acids
  MISC_FEATURE (2)..(2): X is A or G
  MISC_FEATURE (3)..(3): X is N or Q for amidated amino acids
  MISC_FEATURE (4)..(4): X is D and E for acidic amino acids
  MISC_FEATURE (5)..(5): X is D and E for acidic amino acids
  MISC_FEATURE (6)..(6): X is K, R or H for basic amino acids
  MISC_FEATURE (7)..(7): X is A or G
  MISC_FEATURE (8)..(8): X is A or G
  MISC_FEATURE (9)..(9): X is I, L or V
  MISC_FEATURE (10)..(10): X is I, L or V
  MISC_FEATURE (11)..(11): X is C or S
  MISC_FEATURE (12)..(12): X is T or S
  MISC_FEATURE (13)..(13): X is A or G
  MISC_FEATURE (14)..(14): X is I, L or V
  MISC_FEATURE (15)..(15): X is I, L or V
  MISC_FEATURE (16)..(16): X is A or G
  MISC_FEATURE (17)..(17): X is A or G
  MISC_FEATURE (18)..(18): X is A or G
  MISC_FEATURE (19)..(19): X is K, R or H for basic amino acids
  MISC_FEATURE (20)..(20): X is N or Q for amidated amino acids
  MISC_FEATURE (21)..(21): X is I, L or V
  MISC_FEATURE (22)..(22): X is I, L or V
  MISC_FEATURE (23)..(23): X is T or S
  MISC_FEATURE (24)..(24): X is F or P
  MISC_FEATURE (25)..(25): X is K, R or H for basic amino acids
  MISC_FEATURE (26)..(26): X is T or  S
XXXXXXXXXXXXXXXXXXXXXXXXXX

SEQ ID NO: 203 - protein, 33 aa, Artificial
  Completely synthesized peptide construct
DGQEEKAGVVSTGLIGGGGDKVSFFCKNKEKKC

SEQ ID NO: 204 - protein, 33 aa, Artificial; identical to SEQ ID NO: 99
  peptide construct
  MISC_FEATURE (1)..(1): X is D and E for acidic amino acids
  MISC_FEATURE (2)..(2): X is A or G
  MISC_FEATURE (3)..(3): X is N or Q for amidated amino acids
  MISC_FEATURE (4)..(4): X is D and E for acidic amino acids
  MISC_FEATURE (5)..(5): X is D and E for acidic amino acids
  MISC_FEATURE (6)..(6): X is K, R or H for basic amino acids
  MISC_FEATURE (7)..(7): X is A or G
  MISC_FEATURE (8)..(8): X is A or G
  MISC_FEATURE (9)..(9): X is I, L or V
  MISC_FEATURE (10)..(10): X is I, L or V
  MISC_FEATURE (11)..(11): X is C or S
  MISC_FEATURE (12)..(12): X is T or S
  MISC_FEATURE (13)..(13): X is A or G
  MISC_FEATURE (14)..(14): X is I, L or V
  MISC_FEATURE (15)..(15): X is I, L or V
  MISC_FEATURE (16)..(16): X is A or G
  MISC_FEATURE (17)..(17): X is A or G
  MISC_FEATURE (18)..(18): X is A or G
  MISC_FEATURE (19)..(19): X is A or G
  MISC_FEATURE (20)..(20): X is D and E for acidic amino acids
  MISC_FEATURE (21)..(21): X is K, R or H for basic amino acids
  MISC_FEATURE (22)..(22): X is I, L or V
  MISC_FEATURE (23)..(23): X is C or S
  MISC_FEATURE (24)..(24): X is F, W or Y for aromatic amino acids
  MISC_FEATURE (25)..(25): X is F, W or Y for aromatic amino acids
  MISC_FEATURE (26)..(26): X is C or S
  MISC_FEATURE (27)..(27): X is K, R or H for basic amino acids
  MISC_FEATURE (28)..(28): X is N or Q for amidated amino acids
  MISC_FEATURE (29)..(29): X is K, R or H for basic amino acids
  MISC_FEATURE (30)..(30): X is D and E for acidic amino acids
  MISC_FEATURE (31)..(31): X is K, R or H for basic amino acids
  MISC_FEATURE (32)..(32): X is K, R or H for basic amino acids
  MISC_FEATURE (33)..(33): X is C or S

SEQ ID NO: 205 - protein, 35 aa, Artificial
  Completely synthesized peptide construct
DGQEEKAGVVSTGLIGGGEIIVTHFPFDEQNCSMK

SEQ ID NO: 206 - protein, 35 aa, Artificial
  peptide construct
  MISC_FEATURE (1)..(1): X is D and E for acidic amino acids
  MISC_FEATURE (2)..(2): X is A or G
  MISC_FEATURE (3)..(3): X is N or Q for amidated amino acids
  MISC_FEATURE (4)..(4): X is D and E for acidic amino acids
  MISC_FEATURE (5)..(5): X is D and E for acidic amino acids
  MISC_FEATURE (6)..(6): X is K, R or H for basic amino acids
  MISC_FEATURE (7)..(7): X is A or G
  MISC_FEATURE (8)..(8): X is A or G
  MISC_FEATURE (9)..(9): X is I, L or V
  MISC_FEATURE (10)..(10): X is I, L or V
  MISC_FEATURE (11)..(11): X is C or S
  MISC_FEATURE (12)..(12): X is T or S
  MISC_FEATURE (13)..(13): X is A or G
  MISC_FEATURE (14)..(14): X is I, L or V
  MISC_FEATURE (15)..(15): X is I, L or V
  MISC_FEATURE (16)..(16): X is A or G
  MISC_FEATURE (17)..(17): X is A or G
  MISC_FEATURE (18)..(18): X is A or G
  MISC_FEATURE (19)..(19): X is D and E for acidic amino acids
  MISC_FEATURE (20)..(20): X is I, L or V
  MISC_FEATURE (21)..(21): X is I, L or V
  MISC_FEATURE (22)..(22): X is I, L or V
  MISC_FEATURE (23)..(23): X is T or S
  MISC_FEATURE (24)..(24): X is K, R or H for basic amino acids
  MISC_FEATURE (25)..(25): X is F, W or Y for aromatic amino acids
  MISC_FEATURE (26)..(26): X is F or P
  MISC_FEATURE (27)..(27): X is F, W or Y for aromatic amino acids
  MISC_FEATURE (28)..(28): X is D and E for acidic amino acids
  MISC_FEATURE (29)..(29): X is D and E for acidic amino acids
  MISC_FEATURE (30)..(30): X is N or Q for amidated amino acids
  MISC_FEATURE (31)..(31): X is N or Q for amidated amino acids
  MISC_FEATURE (32)..(32): X is C or S
  MISC_FEATURE (33)..(33): X is C or S
  MISC_FEATURE (34)..(34): X is M or Nle
  MISC_FEATURE (35)..(35): X is K, R or H for basic  amino acids
XXXXXXXXXXXXXXXXXXXXXXXXXXXXXXXXXXX

SEQ ID NO: 207 - protein, 31 aa, Artificial
  Completely synthesized peptide construct
DGQEEKAGVVSTGLIGGGVHFFKNIVTPRTP

SEQ ID NO: 208 - protein, 31 aa, Artificial; identical to SEQ ID NO: 130
  peptide construct
  MISC_FEATURE (1)..(1): X is D and E for acidic amino acids
  MISC_FEATURE (2)..(2): X is A or G
  MISC_FEATURE (3)..(3): X is N or Q for amidated amino acids
  MISC_FEATURE (4)..(4): X is D and E for acidic amino acids
  MISC_FEATURE (5)..(5): X is D and E for acidic amino acids
  MISC_FEATURE (6)..(6): X is K, R or H for basic amino acids
  MISC_FEATURE (7)..(7): X is A or G
  MISC_FEATURE (8)..(8): X is A or G
  MISC_FEATURE (9)..(9): X is I, L or V
  MISC_FEATURE (10)..(10): X is I, L or V
  MISC_FEATURE (11)..(11): X is C or S
  MISC_FEATURE (12)..(12): X is T or S
  MISC_FEATURE (13)..(13): X is A or G
  MISC_FEATURE (14)..(14): X is I, L or V
  MISC_FEATURE (15)..(15): X is I, L or V
  MISC_FEATURE (16)..(16): X is A or G
  MISC_FEATURE (17)..(17): X is A or G
  MISC_FEATURE (18)..(18): X is A or G
  MISC_FEATURE (19)..(19): X is I, L or V
  MISC_FEATURE (20)..(20): X is K, R or H for basic amino acids
  MISC_FEATURE (21)..(21): X is F, W or Y for aromatic amino acids
  MISC_FEATURE (22)..(22): X is F, W or Y for aromatic amino acids
  MISC_FEATURE (23)..(23): X is K,  R or H for basic amino acids
  MISC_FEATURE (24)..(24): X is N or Q for amidated amino acids
  MISC_FEATURE (25)..(25): X is I, L or V
  MISC_FEATURE (26)..(26): X is I, L or V
  MISC_FEATURE (27)..(27): X is T or S
  MISC_FEATURE (28)..(28): X is F or P
  MISC_FEATURE (29)..(29): X is K, R or H for basic amino acids
  MISC_FEATURE (30)..(30): X is T or S
  MISC_FEATURE (31)..(31): X is F or P

SEQ ID NO: 209 - protein, 35 aa, Artificial
  Completely synthesized peptide construct
DGQEEKAGVVSTGLIGGGYQQLNSERGVPNENIEN

SEQ ID NO: 210 - protein, 35 aa, Artificial; identical to SEQ ID NO: 206
  peptide construct
  MISC_FEATURE (1)..(1): X is D and E for acidic amino acids
  MISC_FEATURE (2)..(2): X is A or G
  MISC_FEATURE (3)..(3): X is N or Q for amidated amino acids
  MISC_FEATURE (4)..(4): X is D and E for acidic amino acids
  MISC_FEATURE (5)..(5): X is D and E for acidic amino acids
  MISC_FEATURE (6)..(6): X is K, R or H for basic amino acids
  MISC_FEATURE (7)..(7): X is A or G
  MISC_FEATURE (8)..(8): X is A or G
  MISC_FEATURE (9)..(9): X is I, L or V
  MISC_FEATURE (10)..(10): X is I, L or V
  MISC_FEATURE (11)..(11): X is C or S
  MISC_FEATURE (12)..(12): X is T or S
  MISC_FEATURE (13)..(13): X is A or G
  MISC_FEATURE (14)..(14): X is I, L or V
  MISC_FEATURE (15)..(15): X is I, L or V
  MISC_FEATURE (16)..(16): X is A or G
  MISC_FEATURE (17)..(17): X is A or G
  MISC_FEATURE (18)..(18): X is A or G
  MISC_FEATURE (19)..(19): X is F, W or Y for aromatic amino acids
  MISC_FEATURE (20)..(20): X is N or Q for amidated amino acids
  MISC_FEATURE (21)..(21): X is N or Q for amidated amino acids
  MISC_FEATURE (22)..(22): X is I, L or V
  MISC_FEATURE (23)..(23): X is N or Q for amidated amino acids
  MISC_FEATURE (24)..(24): X is C or S
  MISC_FEATURE (25)..(25): X is D and E for acidic amino acids
  MISC_FEATURE (26)..(26): X is K, R or H for basic amino acids
  MISC_FEATURE (27)..(27): X is A or G
  MISC_FEATURE (28)..(28): X is I, L or V
  MISC_FEATURE (29)..(29): X is F or P
  MISC_FEATURE (30)..(30): X is N or Q for amidated amino acids
  MISC_FEATURE (31)..(31): X is D and E for acidic amino acids
  MISC_FEATURE (32)..(32): X is N or Q for amidated amino acids
  MISC_FEATURE (33)..(33): X is I, L or V
  MISC_FEATURE (34)..(34): X is D and E for acidic amino acids
  MISC_FEATURE (35)..(35): X is N or Q for amidated amino acids

SEQ ID NO: 211 - protein, 31 aa, Artificial
  Completely synthesized peptide construct
DGQEEKAGVVSTGLIGGGVFIKRVSNVIIHG

SEQ ID NO: 212 - protein, 31 aa, Artificial; identical to SEQ ID NO: 130
  peptide construct
  MISC_FEATURE (1)..(1): X is D and E for acidic amino acids
  MISC_FEATURE (2)..(2): X is A or G
  MISC_FEATURE (3)..(3): X is N or Q for amidated amino acids
  MISC_FEATURE (4)..(4): X is D and E for acidic amino acids
  MISC_FEATURE (5)..(5): X is D and E for acidic amino acids
  MISC_FEATURE (6)..(6): X is K, R or H for basic amino acids
  MISC_FEATURE (7)..(7): X is A or G
  MISC_FEATURE (8)..(8): X is A or G
  MISC_FEATURE (9)..(9): X is I, L or V
  MISC_FEATURE (10)..(10): X is I, L or V
  MISC_FEATURE (11)..(11): X is C or S
  MISC_FEATURE (12)..(12): X is T or S
  MISC_FEATURE (13)..(13): X is A or G
  MISC_FEATURE (14)..(14): X is I, L or V
  MISC_FEATURE (15)..(15): X is I, L or V
  MISC_FEATURE (16)..(16): X is A or G
  MISC_FEATURE (17)..(17): X is A or G
  MISC_FEATURE (18)..(18): X is A or G
  MISC_FEATURE (19)..(19): X is I, L or V
  MISC_FEATURE (20)..(20): X is F, W or Y for aromatic amino acids
  MISC_FEATURE (21)..(21): X is I, L or V
  MISC_FEATURE (22)..(22): X is K, R or H for basic amino acids
  MISC_FEATURE (23)..(23): X is K, R or H for basic amino acids
  MISC_FEATURE (24)..(24): X is I, L or V
  MISC_FEATURE (25)..(25): X is C or S
  MISC_FEATURE (26)..(26): X is N or Q for amidated amino acids
  MISC_FEATURE (27)..(27): X is I, L or V
  MISC_FEATURE (28)..(28): X is I, L or V
  MISC_FEATURE (29)..(29): X is I, L or V
  MISC_FEATURE (30)..(30): X is K, R or H for basic amino acids
  MISC_FEATURE (31)..(31): X is A or G

SEQ ID NO: 213 - protein, 33 aa, Artificial
  Completely synthesized peptide construct
DGQEEKAGVVSTGLIGGGMKVTVAFNQFGPNRR

SEQ ID NO: 214 - protein, 33 aa, Artificial; identical to SEQ ID NO: 99
  peptide construct
  MISC_FEATURE (1)..(1): X is D and E for acidic amino acids
  MISC_FEATURE (2)..(2): X is A or G
  MISC_FEATURE (3)..(3): X is N or Q for amidated amino acids
  MISC_FEATURE (4)..(4): X is D and E for acidic amino acids
  MISC_FEATURE (5)..(5): X is D and E for acidic amino acids
  MISC_FEATURE (6)..(6): X is K, R or H for basic amino acids
  MISC_FEATURE (7)..(7): X is A or G
  MISC_FEATURE (8)..(8): X is A or G
  MISC_FEATURE (9)..(9): X is I, L or V
  MISC_FEATURE (10)..(10): X is I, L or V
  MISC_FEATURE (11)..(11): X is C or S
  MISC_FEATURE (12)..(12): X is T or S
  MISC_FEATURE (13)..(13): X is A or G
  MISC_FEATURE (14)..(14): X is I, L or V
  MISC_FEATURE (15)..(15): X is I, L or V
  MISC_FEATURE (16)..(16): X is A or G
  MISC_FEATURE (17)..(17): X is A or G
  MISC_FEATURE (18)..(18): X is A or G
  MISC_FEATURE (19)..(19): X is M or Nle
  MISC_FEATURE (20)..(20): X is K, R or H for basic amino acids
  MISC_FEATURE (21)..(21): X is I, L or V
  MISC_FEATURE (22)..(22): X is T or S
  MISC_FEATURE (23)..(23): X is I, L or V
  MISC_FEATURE (24)..(24): X is A or G
  MISC_FEATURE (25)..(25): X is F, W or Y for aromatic amino acids
  MISC_FEATURE (26)..(26): X is N or Q for amidated amino acids
  MISC_FEATURE (27)..(27): X is N or Q for amidated amino acids
  MISC_FEATURE (28)..(28): X is F, W or Y for aromatic amino acids
  MISC_FEATURE (29)..(29): X is A or G
  MISC_FEATURE (30)..(30): X is F or P
  MISC_FEATURE (31)..(31): X is N or Q for amidated amino acids
  MISC_FEATURE (32)..(32): X is K, R or H for basic amino acids
  MISC_FEATURE (33)..(33): X is K, R or H for basic amino acids

SEQ ID NO: 215 - protein, 33 aa, Artificial
  Completely synthesized peptide construct
DGQEEKAGVVSTGLIGGGIASRRVDGIIAAYQN

SEQ ID NO: 216 - protein, 33 aa, Artificial; identical to SEQ ID NO: 99
  peptide construct
  MISC_FEATURE (1)..(1): X is D and E for acidic amino acids
  MISC_FEATURE (2)..(2): X is A or G
  MISC_FEATURE (3)..(3): X is N or Q for amidated amino acids
  MISC_FEATURE (4)..(4): X is D and E for acidic amino acids
  MISC_FEATURE (5)..(5): X is D and E for acidic amino acids
  MISC_FEATURE (6)..(6): X is K, R or H for basic amino acids
  MISC_FEATURE (7)..(7): X is A or G
  MISC_FEATURE (8)..(8): X is A or G
  MISC_FEATURE (9)..(9): X is I, L or V
  MISC_FEATURE (10)..(10): X is I, L or V
  MISC_FEATURE (11)..(11): X is C or S
  MISC_FEATURE (12)..(12): X is T or S
  MISC_FEATURE (13)..(13): X is A or G
  MISC_FEATURE (14)..(14): X is I, L or V
  MISC_FEATURE (15)..(15): X is I, L or V
  MISC_FEATURE (16)..(16): X is A or G
  MISC_FEATURE (17)..(17): X is A or G
  MISC_FEATURE (18)..(18): X is A or G
  MISC_FEATURE (19)..(19): X is I, L or V
  MISC_FEATURE (20)..(20): X is A or G
  MISC_FEATURE (21)..(21): X is C or S
  MISC_FEATURE (22)..(22): X is K, Ror H for basic amino acids
  MISC_FEATURE (23)..(23): X is K, R or H for basic amino acids
  MISC_FEATURE (24)..(24): X is I, L or V
  MISC_FEATURE (25)..(25): X is D and E for acidic amino acids
  MISC_FEATURE (26)..(26): X is A or G
  MISC_FEATURE (27)..(27): X is I, L or V
  MISC_FEATURE (28)..(28): X is I, L or V
  MISC_FEATURE (29)..(29): X is A or G
  MISC_FEATURE (30)..(30): X is A or G
  MISC_FEATURE (31)..(31): X is F, W or Y for aromatic amino acids
  MISC_FEATURE (32)..(32): X is N or Q for amidated amino acids
  MISC_FEATURE (33)..(33): X is N or Q for amidated amino acids

SEQ ID NO: 217 - protein, 38 aa, Artificial
  Completely synthesized peptide construct
DGQEEKAGVVSTGLIGGGGIDIFASKNFHLQKNTIGTG

SEQ ID NO: 218 - protein, 37 aa, Artificial; identical to SEQ ID NO: 158
  peptide construct
  MISC_FEATURE (1)..(1): X is D and E for acidic amino acids
  MISC_FEATURE (2)..(2): X is A or G
  MISC_FEATURE (3)..(3): X is N or Q for amidated amino acids
  MISC_FEATURE (4)..(4): X is D and E for acidic amino acids
  MISC_FEATURE (5)..(5): X is D and E for acidic amino acids
  MISC_FEATURE (6)..(6): X is K, R or H for basic amino acids
  MISC_FEATURE (7)..(7): X is A or G
  MISC_FEATURE (8)..(8): X is A or G
  MISC_FEATURE (9)..(9): X is I, L or V
  MISC_FEATURE (10)..(10): X is I, L or V
  MISC_FEATURE (11)..(11): X is C or S
  MISC_FEATURE (12)..(12): X is T or S
  MISC_FEATURE (13)..(13): X is A or G
  MISC_FEATURE (14)..(14): X is I, L or V
  MISC_FEATURE (15)..(15): X is I, L or V
  MISC_FEATURE (16)..(16): X is A or G
  MISC_FEATURE (17)..(17): X is A or G
  MISC_FEATURE (18)..(18): X is A or G
  MISC_FEATURE (19)..(19): X is I, L or V
  MISC_FEATURE (20)..(20): X is D and E for acidic amino acids
  MISC_FEATURE (21)..(21): X is I, L or V
  MISC_FEATURE (22)..(22): X is F, W or Y for aromatic amino acids
  MISC_FEATURE (23)..(23): X is A or G
  MISC_FEATURE (24)..(24): X is C or S
  MISC_FEATURE (25)..(25): X is K, R or H for basic amino acids
  MISC_FEATURE (26)..(26): X is N or Q for amidated amino acids
  MISC_FEATURE (27)..(27): X is F, W or Y for aromatic amino acids
  MISC_FEATURE (28)..(28): X is K, R or H for basic amino acids
  MISC_FEATURE (29)..(29): X is I, L or V
  MISC_FEATURE (30)..(30): X is N or Q for amidated amino acids
  MISC_FEATURE (31)..(31): X is K, R or H for basic amino acids
  MISC_FEATURE (32)..(32): X is N or Q for amidated amino acids
  MISC_FEATURE (33)..(33): X is T or S
  MISC_FEATURE (34)..(34): X is I, L or V
  MISC_FEATURE (35)..(35): X is A or G
  MISC_FEATURE (36)..(36): X is T or S
  MISC_FEATURE (37)..(37): X is A or G

SEQ ID NO: 219 - protein, 43 aa, Artificial
  Completely synthesized peptide construct
DGQEEKAGVVSTGLIGGGGIGAVLKVLTTGPALISWIKRKRQQ

SEQ ID NO: 220 - protein, 43 aa, Artificial
  peptide construct
  MISC_FEATURE (1)..(1): X is D and E for acidic amino acids
  MISC_FEATURE (2)..(2): X is A or G
  MISC_FEATURE (3)..(3): X is N or Q for amidated amino acids
  MISC_FEATURE (4)..(4): X is D and E for acidic amino acids
  MISC_FEATURE (5)..(5): X is D and E for acidic amino acids
  MISC_FEATURE (6)..(6): X is K, R or H for basic amino acids
  MISC_FEATURE (7)..(7): X is A or G
  MISC_FEATURE (8)..(8): X is A or G
  MISC_FEATURE (9)..(9): X is I, L or V
  MISC_FEATURE (10)..(10): X is I, L or V
  MISC_FEATURE (11)..(11): X is C or S
  MISC_FEATURE (12)..(12): X is T or S
  MISC_FEATURE (13)..(13): X is A or G
  MISC_FEATURE (14)..(14): X is I, L or V
  MISC_FEATURE (15)..(15): X is I, L or V
  MISC_FEATURE (16)..(16): X is A or G
  MISC_FEATURE (17)..(17): X is A or G
  MISC_FEATURE (18)..(18): X is A or G
  MISC_FEATURE (19)..(19): X is A or G
  MISC_FEATURE (20)..(20): X is I, L or V
  MISC_FEATURE (21)..(21): X is A or G
  MISC_FEATURE (22)..(22): X is A or G
  MISC_FEATURE (23)..(23): X is I, L or V
  MISC_FEATURE (24)..(24): X is I, L or V
  MISC_FEATURE (25)..(25): X is K, R or H for basic amino acids
  MISC_FEATURE (26)..(26): X is I, L or V
  MISC_FEATURE (27)..(27): X is I, L or V
  MISC_FEATURE (28)..(28): X is T or S
  MISC_FEATURE (29)..(29): X is T or S
  MISC_FEATURE (30)..(30): X is A or G
  MISC_FEATURE (31)..(31): X is F or P
  MISC_FEATURE (32)..(32): X is A or G
  MISC_FEATURE (33)..(33): X is I, L or V
  MISC_FEATURE (34)..(34): X is I, L or V
  MISC_FEATURE (35)..(35): X is C or S
  MISC_FEATURE (36)..(36): X is F, W or Y for aromatic amino acids
  MISC_FEATURE (37)..(37): X is I, L or V
  MISC_FEATURE (38)..(38): X is K, R or H for basic amino acids
  MISC_FEATURE (39)..(39): X is K, R or H for basic amino acids
  MISC_FEATURE (40)..(40): X is K, R or H for basic amino acids
  MISC_FEATURE (41)..(41): X is K, R or H for basic amino acids
  MISC_FEATURE (42)..(42): X is N or Q for amidated amino acids
  MISC_FEATURE (43)..(43): X is N or Q for amidated amino acids
XXXXXXXXXXXXXXXXXXXXXXXXXXXXXXXXXXXXXXXXXXX

SEQ ID NO: 221 - protein, 58 aa, Artificial
  Completely synthesized peptide construct
DAEFRHDSGYEVHHQKLVFFAEDVGSKNGAIIGLMVGGVVGGGDGQEEKAGVVSTGLI

SEQ ID NO: 222 - protein, 58 aa, Artificial; identical to SEQ ID NO: 142
  peptide construct
  MISC_FEATURE (1)..(1): X is D and E for acidic amino acids
  MISC_FEATURE (2)..(2): X is A or G
  MISC_FEATURE (3)..(3): X is D and E for acidic amino acids
  MISC_FEATURE (4)..(4): X is F, W or Y for aromatic amino acids
  MISC_FEATURE (5)..(5): X is K, R or H for basic amino acids
  MISC_FEATURE (6)..(6): X is K, R or H for basic amino acids
  MISC_FEATURE (7)..(7): X is D and E for acidic amino acids
  MISC_FEATURE (8)..(8): X is T or S
  MISC_FEATURE (9)..(9): X is A or G
  MISC_FEATURE (10)..(10): X is F,  W or Y for aromatic amino acids
  MISC_FEATURE (11)..(11): X is D and E for acidic amino acids
  MISC_FEATURE (12)..(12): X is I, L or V
  MISC_FEATURE (13)..(13): X is K, R or H for basic amino acids
  MISC_FEATURE (14)..(14): X is K, R or H for basic amino acids
  MISC_FEATURE (15)..(15): X is N or Q for amidated amino acids
  MISC_FEATURE (16)..(16): X is K, R or H for basic amino acids
  MISC_FEATURE (17)..(17): X is I, L or V
  MISC_FEATURE (18)..(18): X is I, L or V
  MISC_FEATURE (19)..(19): X is F, W or Y for aromatic amino acids
  MISC_FEATURE (20)..(20): X is F, W or Y for aromatic amino acids
  MISC_FEATURE (21)..(21): X is A or G
  MISC_FEATURE (22)..(22): X is D and E for acidic amino acids
  MISC_FEATURE (23)..(23): X is D and E for acidic amino acids
  MISC_FEATURE (24)..(24): X is I, L or V
  MISC_FEATURE (25)..(25): X is A or G
  MISC_FEATURE (26)..(26): X is C or S
  MISC_FEATURE (27)..(27): X is N or Q for amidated amino acids
  MISC_FEATURE (28)..(28): X is K, R or H for basic amino acids
  MISC_FEATURE (29)..(29): X is A or G
  MISC_FEATURE (30)..(30): X is A or G
  MISC_FEATURE (31)..(31): X is I, L or V
  MISC_FEATURE (32)..(32): X is I, L or V
  MISC_FEATURE (33)..(33): X is A or G
  MISC_FEATURE (34)..(34): X is I, L or V
  MISC_FEATURE (35)..(35): X is M or Nle
  MISC_FEATURE (36)..(36): X is I, L or V
  MISC_FEATURE (37)..(37): X is A or G
  MISC_FEATURE (38)..(38): X is A or G
  MISC_FEATURE (39)..(39): X is I, L or V
  MISC_FEATURE (40)..(40): X is I, L or V
  MISC_FEATURE (41)..(41): X is A and G
  MISC_FEATURE (42)..(42): X is A or G
  MISC_FEATURE (43)..(43): X is A and G
  MISC_FEATURE (44)..(44): X is D and E for acidic amino acids
  MISC_FEATURE (45)..(45): X is A and G
  MISC_FEATURE (46)..(46): X is N or Q for amidated amino acids
  MISC_FEATURE (47)..(47): X is D and E for acidic amino acids
  MISC_FEATURE (48)..(48): X is D and E for acidic amino acids
  MISC_FEATURE (49)..(49): X is K, R or H for basic amino acids
  MISC_FEATURE (50)..(50): X is A and G
  MISC_FEATURE (51)..(51): X is A and G
  MISC_FEATURE (52)..(52): X is I, L or V
  MISC_FEATURE (53)..(53): X is I, L or V
  MISC_FEATURE (54)..(54): X is C or S
  MISC_FEATURE (55)..(55): X is T or S
  MISC_FEATURE (56)..(56): X is A and G
  MISC_FEATURE (57)..(57): X is I, L or V
  MISC_FEATURE (58)..(58): X is I, L or V

SEQ ID NO: 223 - protein, 46 aa, Artificial
  Completely synthesized peptide construct
DAEFRHDSGYEVHHQKLVFFAENVGSNKGGGDGQEEKAGVVSTGLI

SEQ ID NO: 224 - protein, 46 aa, Artificial; identical to SEQ ID NO: 144
  peptide construct
  MISC_FEATURE (1)..(1): X is D and E for acidic amino acids
  MISC_FEATURE (2)..(2): X is A or G
  MISC_FEATURE (3)..(3): X is D and E for acidic amino acids
  MISC_FEATURE (4)..(4): X is F, W or Y for aromatic amino acids
  MISC_FEATURE (5)..(5): X is K, R or H for basic amino acids
  MISC_FEATURE (6)..(6): X is K, R or H for basic amino acids
  MISC_FEATURE (7)..(7): X is D and E for acidic amino acids
  MISC_FEATURE (8)..(8): X is Tor S
  MISC_FEATURE (9)..(9): X is A or G
  MISC_FEATURE (10)..(10): X is F, W or Y for aromatic amino acids
  MISC_FEATURE (11)..(11): X is D and E for acidic amino acids
  MISC_FEATURE (12)..(12): X is I, L or V
  MISC_FEATURE (13)..(13): X is K, R or H for basic amino acids
  MISC_FEATURE (14)..(14): X is K, R or H for basic amino acids
  MISC_FEATURE (15)..(15): X is N or Q for amidated amino acids
  MISC_FEATURE (16)..(16): X is K, R or H for basic amino acids
  MISC_FEATURE (17)..(17): X is I, L or V
  MISC_FEATURE (18)..(18): X is I, L or V
  MISC_FEATURE (19)..(19): X is F, W or Y for aromatic amino acids
  MISC_FEATURE (20)..(20): X is F, W or Y for aromatic amino acids
  MISC_FEATURE (21)..(21): X is A or G
  MISC_FEATURE (22)..(22): X is D and E for acidic amino acids
  MISC_FEATURE (23)..(23): X is D and E for acidic amino acids
  MISC_FEATURE (24)..(24): X is I, L or V
  MISC_FEATURE (25)..(25): X is A or G
  MISC_FEATURE (26)..(26): X is C or S
  MISC_FEATURE (27)..(27): X is N or Q for amidated amino acids
  MISC_FEATURE (28)..(28): X is K, R or H for basic amino acids
  MISC_FEATURE (29)..(29): X is A and G
  MISC_FEATURE (30)..(30): X is A or G
  MISC_FEATURE (31)..(31): X is A and G
  MISC_FEATURE (32)..(32): X is D and E for acidic amino acids
  MISC_FEATURE (33)..(33): X is A and G
  MISC_FEATURE (34)..(34): X is N or Q for amidated amino acids
  MISC_FEATURE (35)..(35): X is D and E for acidic amino acids
  MISC_FEATURE (36)..(36): X is D and E for acidic amino acids
  MISC_FEATURE (37)..(37): X is K, R or H for basic amino acids
  MISC_FEATURE (38)..(38): X is A andG
  MISC_FEATURE (39)..(39): X is A and G
  MISC_FEATURE (40)..(40): X is I, L or V
  MISC_FEATURE (41)..(41): X is I, L or V
  MISC_FEATURE (42)..(42): X is C or S
  MISC_FEATURE (43)..(43): X is T or S
  MISC_FEATURE (44)..(44): X is A or G
  MISC_FEATURE (45)..(45): X is I, L or V
  MISC_FEATURE (46)..(46): X is I, L or V

SEQ ID NO: 225 - protein, 48 aa, Artificial
  Completely synthesized peptide construct
DAEFRHDSGYEVHHQKLVFFAENVGSNKAIGGGDGQEEKAGVVSTGLI

SEQ ID NO: 226 - protein, 48 aa, Artificial; identical to SEQ ID NO: 146
  peptide construct
  MISC_FEATURE (1)..(1): X is D and E for acidic amino acids
  MISC_FEATURE (2)..(2): X is A or G
  MISC_FEATURE (3)..(3): X is D and E for acidic amino acids
  MISC_FEATURE (4)..(4): X is F, W or Y for aromatic amino acids
  MISC_FEATURE (5)..(5): X is K, R or H for basic amino acids
  MISC_FEATURE (6)..(6): X is K, R or H for basic amino acids
  MISC_FEATURE (7)..(7): X is D and E for acidic amino acids
  MISC_FEATURE (8)..(8): X is T or S
  MISC_FEATURE (9)..(9): X is A or G
  MISC_FEATURE (10)..(10): X is F, W or Y for aromatic amino acids
  MISC_FEATURE (11)..(11): X is D and E for acidic amino acids
  MISC_FEATURE (12)..(12): X is I, L or V
  MISC_FEATURE (13)..(13): X is K, R or H for basic amino acids
  MISC_FEATURE (14)..(14): X is K, R or H for basic amino acids
  MISC_FEATURE (15)..(15): X is N or Q for amidated amino acids
  MISC_FEATURE (16)..(16): X is K, R or H for basic amino acids
  MISC_FEATURE (17)..(17): X is I, L or V
  MISC_FEATURE (18)..(18): X is I, L or V
  MISC_FEATURE (19)..(19): X is F, W or Y for aromatic amino acids
  MISC_FEATURE (20)..(20): X is F, W or Y for aromatic amino acids
  MISC_FEATURE (21)..(21): X is A or G
  MISC_FEATURE (22)..(22): X is D and E for acidic amino acids
  MISC_FEATURE (23)..(23): X is D and E for acidic amino acids
  MISC_FEATURE (24)..(24): X is I, L or V
  MISC_FEATURE (25)..(25): X is A or G
  MISC_FEATURE (26)..(26): X is C or S
  MISC_FEATURE (27)..(27): X is N or Q for amidated amino acids
  MISC_FEATURE (28)..(28): X is K, R or H for basic amino acids
  MISC_FEATURE (29)..(29): X is A  or G
  MISC_FEATURE (30)..(30): X is I, L or V
  MISC_FEATURE (31)..(31): X is A and G
  MISC_FEATURE (32)..(32): X is A or G
  MISC_FEATURE (33)..(33): X is A and G
  MISC_FEATURE (34)..(34): X is D and E for acidic amino acids
  MISC_FEATURE (35)..(35): X is A and G
  MISC_FEATURE (36)..(36): X is  N or Q for amidated amino acids
  MISC_FEATURE (37)..(37): X is D and E for acidic amino acids
  MISC_FEATURE (38)..(38): X is D and E for acidic amino acids
  MISC_FEATURE (39)..(39): X is K, R or H for basic amino acids
  MISC_FEATURE (40)..(40): X is A and G
  MISC_FEATURE (41)..(41): X is A and G
  MISC_FEATURE (42)..(42): X is I, L or V
  MISC_FEATURE (43)..(43): X is I, L or V
  MISC_FEATURE (44)..(44): X is C or S
  MISC_FEATURE (45)..(45): X is T or S
  MISC_FEATURE (46)..(46): X is A or G
  MISC_FEATURE (47)..(47): X is I, L or V
  MISC_FEATURE (48)..(48): X is I, L or V

SEQ ID NO: 227 - protein, 29 aa, Artificial
  Completely synthesized peptide construct
DAEFRHDSGYEGGGDGQEEKAGVVSTGLI

SEQ ID NO: 228 - protein, 29 aa, Artificial
  peptide construct
  MISC_FEATURE (1)..(1): X is D and E for acidic amino acids
  MISC_FEATURE (2)..(2): X is A or G
  MISC_FEATURE (3)..(3): X is D and E for acidic amino acids
  MISC_FEATURE (4)..(4): X is F, W or Y for aromatic amino acids
  MISC_FEATURE (5)..(5): X is K, R or H for basic amino acids
  MISC_FEATURE (6)..(6): X is K, R or H for basic amino acids
  MISC_FEATURE (7)..(7): X is D and E for acidic amino acids
  MISC_FEATURE (8)..(8): X is T or S
  MISC_FEATURE (9)..(9): X is A or G
  MISC_FEATURE (10)..(10): X is F, W or Y for aromatic amino acids
  MISC_FEATURE (11)..(11): X is D and E for acidic amino acids
  MISC_FEATURE (12)..(12): X is A and G
  MISC_FEATURE (13)..(13): X is A or G
  MISC_FEATURE (14)..(14): X is A and G
  MISC_FEATURE (15)..(15): X is D and E for acidic amino acids
  MISC_FEATURE (16)..(16): X is A and G
  MISC_FEATURE (17)..(17): X is N or Q for amidated amino acids
  MISC_FEATURE (18)..(18): X is D and E for acidic amino acids
  MISC_FEATURE (19)..(19): X is D and E for acidic amino acids
  MISC_FEATURE (20)..(20): X is K, R or H for basic amino acids
  MISC_FEATURE (21)..(21): X is A and G
  MISC_FEATURE (22)..(22): X is A and G
  MISC_FEATURE (23)..(23): X is I, L or V
  MISC_FEATURE (24)..(24): X is I, L or V
  MISC_FEATURE (25)..(25): X is C or S
  MISC_FEATURE (26)..(26): X is T or S
  MISC_FEATURE (27)..(27): X is A or G
  MISC_FEATURE (28)..(28): X is I, L or V
  MISC_FEATURE (29)..(29): X is I, L or V
XXXXXXXXXXXXXXXXXXXXXXXXXXXXX

SEQ ID NO: 229 - protein, 25 aa, Artificial
  Completely synthesized peptide construct
EVNGSNKGGGDGQEEKAGVVSTGLI

SEQ ID NO: 230 - protein, 25 aa, Artificial
  peptide construct
  MISC_FEATURE (1)..(1): X is Dand E for acidic amino acids
  MISC_FEATURE (2)..(2): X is Dand E for acidic amino acids
  MISC_FEATURE (3)..(3): X is I, L or V
  MISC_FEATURE (4)..(4): X is A or G
  MISC_FEATURE (5)..(5): X is C or S
  MISC_FEATURE (6)..(6): X is N or Q for amidated amino acids
  MISC_FEATURE (7)..(7): X is K, R or H for basic amino acids
  MISC_FEATURE (8)..(8): X is A and G
  MISC_FEATURE (9)..(9): X is A or G
  MISC_FEATURE (10)..(10): X is A and G
  MISC_FEATURE (11)..(11): X is D and E for acidic amino acids
  MISC_FEATURE (12)..(12): X is A and G
  MISC_FEATURE (13)..(13): X is N or Q for amidated amino acids
  MISC_FEATURE (14)..(14): X is D andE for acidic amino acids
  MISC_FEATURE (15)..(15): X is D and E for acidic amino acids
  MISC_FEATURE (16)..(16): X is K, R or H for basic amino acids
  MISC_FEATURE (17)..(17): X is A and G
  MISC_FEATURE (18)..(18): X is A and G
  MISC_FEATURE (19)..(19): X is I, L or V
  MISC_FEATURE (20)..(20): X is I, L or V
  MISC_FEATURE (21)..(21): X is C or S
  MISC_FEATURE (22)..(22): X is T or S
  MISC_FEATURE (23)..(23): X is A  or G
  MISC_FEATURE (24)..(24): X is I, L or V
  MISC_FEATURE (25)..(25): X is I, L or V
XXXXXXXXXXXXXXXXXXXXXXXXX

SEQ ID NO: 231 - protein, 30 aa, Artificial
  Completely synthesized peptide construct
DAEFRHDSGYEVGGGDGQEEKAGVVSTGLI

SEQ ID NO: 232 - protein, 30 aa, Artificial; identical to SEQ ID NO: 58
  peptide construct
  MISC_FEATURE (1)..(1): X is D and E for acidic amino acids
  MISC_FEATURE (2)..(2): X is A or G
  MISC_FEATURE (3)..(3): X is D and E for acidic amino acids
  MISC_FEATURE (4)..(4): X is F, W or Y for aromatic amino acids
  MISC_FEATURE (5)..(5): X is K, R or H for basic amino acids
  MISC_FEATURE (6)..(6): X is K, R or H for basic amino acids
  MISC_FEATURE (7)..(7): X is D and E for acidic amino acids
  MISC_FEATURE (8)..(8): X is T or S
  MISC_FEATURE (9)..(9): X is A or G
  MISC_FEATURE (10)..(10): X is F, W or Y for aromatic amino acids
  MISC_FEATURE (11)..(11): X is D and E for acidic amino acids
  MISC_FEATURE (12)..(12): X is I, L or V
  MISC_FEATURE (13)..(13): X is A and G
  MISC_FEATURE (14)..(14): X is A or G
  MISC_FEATURE (15)..(15): X is A and G
  MISC_FEATURE (16)..(16): X is D and E for acidic amino acids
  MISC_FEATURE (17)..(17): X is A and G
  MISC_FEATURE (18)..(18): X is N or Q for amidated amino acids
  MISC_FEATURE (19)..(19): X is D and E for acidic amino acids
  MISC_FEATURE (20)..(20): X is D and E for acidic amino acids
  MISC_FEATURE (21)..(21): X is K, R or H for basic amino acids
  MISC_FEATURE (22)..(22): X is A and G
  MISC_FEATURE (23)..(23): X is A and G
  MISC_FEATURE (24)..(24): X is I, L or V
  MISC_FEATURE (25)..(25): X is I, L or V
  MISC_FEATURE (26)..(26): X is C or S
  MISC_FEATURE (27)..(27): X is T or S
  MISC_FEATURE (28)..(28): X is A or G
  MISC_FEATURE (29)..(29): X is I, L or V
  MISC_FEATURE (30)..(30): X is I, L or V

SEQ ID NO: 233 - protein, 28 aa, Artificial
  Completely synthesized peptide construct
DAEFRHDSGYGGGDGQEEKAGVVSTGLI

SEQ ID NO: 234 - protein, 28 aa, Artificial
  peptide construct
  MISC_FEATURE (1)..(1): X is D and E for acidic amino acids
  MISC_FEATURE (2)..(2): X is A or G
  MISC_FEATURE (3)..(3): X is D and E for acidic amino acids
  MISC_FEATURE (4)..(4): X is F, W or Y for aromatic amino acids
  MISC_FEATURE (5)..(5): X is K, R or H for basic amino acids
  MISC_FEATURE (6)..(6): X is K, R or H for basic amino acids
  MISC_FEATURE (7)..(7): X is D and E for acidic amino acids
  MISC_FEATURE (8)..(8): X is  T or S
  MISC_FEATURE (9)..(9): X is A or G
  MISC_FEATURE (10)..(10): X is F, W or Y for aromatic amino acids
  MISC_FEATURE (11)..(11): X is A and G
  MISC_FEATURE (12)..(12): X is A or G
  MISC_FEATURE (13)..(13): X is A and G
  MISC_FEATURE (14)..(14): X is D and E for acidic amino acids
  MISC_FEATURE (15)..(15): X is A and G
  MISC_FEATURE (16)..(16): X is N or Q for amidated amino acids
  MISC_FEATURE (17)..(17): X is D and E for acidic amino acids
  MISC_FEATURE (18)..(18): X is D and E for acidic amino acids
  MISC_FEATURE (19)..(19): X is K, R or H for basic amino acids
  MISC_FEATURE (20)..(20): X is A and G
  MISC_FEATURE (21)..(21): X is A and G
  MISC_FEATURE (22)..(22): X is I, L or V
  MISC_FEATURE (23)..(23): X is I, L or V
  MISC_FEATURE (24)..(24): X is C or S
  MISC_FEATURE (25)..(25): X is T or S
  MISC_FEATURE (26)..(26): X is A or G
  MISC_FEATURE (27)..(27): X is I, L or V
  MISC_FEATURE (28)..(28): X is I, L or V
XXXXXXXXXXXXXXXXXXXXXXXXXXXX

SEQ ID NO: 235 - protein, 22 aa, Artificial
  Completely synthesized peptide construct
EFRHGGGDGQEEKAGVVSTGLI

SEQ ID NO: 236 - protein, 22 aa, Artificial
  peptide construct
  MISC_FEATURE (1)..(1): X is D and E for acidic amino acids
  MISC_FEATURE (2)..(2): X is F or  P
  MISC_FEATURE (3)..(3): X is K, R or H for basic amino acids
  MISC_FEATURE (4)..(4): X is K, R or H for basic amino acids
  MISC_FEATURE (5)..(5): X is A and G
  MISC_FEATURE (6)..(6): X is A or G
  MISC_FEATURE (7)..(7): X is A and G
  MISC_FEATURE (8)..(8): X is D and E for acidic amino acids
  MISC_FEATURE (9)..(9): X is A and G
  MISC_FEATURE (10)..(10): X is N or Q for amidated amino acids
  MISC_FEATURE (11)..(11): X is D and E for acidic amino acids
  MISC_FEATURE (12)..(12): X is D and E for acidic amino acids
  MISC_FEATURE (13)..(13): X is K, R or H for basic amino acids
  MISC_FEATURE (14)..(14): X is A and G
  MISC_FEATURE (15)..(15): X is A and G
  MISC_FEATURE (16)..(16): X is I, L or V
  MISC_FEATURE (17)..(17): X is I, L or V
  MISC_FEATURE (18)..(18): X is C or S
  MISC_FEATURE (19)..(19): X is T or S
  MISC_FEATURE (20)..(20): X is A or G
  MISC_FEATURE (21)..(21): X is I, L or V
  MISC_FEATURE (22)..(22): X is I, L or V
XXXXXXXXXXXXXXXXXXXXXX

SEQ ID NO: 237 - protein, 37 aa, Artificial
  Completely synthesized peptide construct
DSAFDVLSFTAEEKAGVYKGGGDGQEEKAGVVSTGLI

SEQ ID NO: 238 - protein, 37 aa, Artificial; identical to SEQ ID NO: 158
  peptide construct
  MISC_FEATURE (1)..(1): X is D and E for acidic amino acids
  MISC_FEATURE (2)..(2): X is C or S
  MISC_FEATURE (3)..(3): X is A or G
  MISC_FEATURE (4)..(4): X is F, W or Y for aromatic amino acids
  MISC_FEATURE (5)..(5): X is D and E for acidic amino acids
  MISC_FEATURE (6)..(6): X is I, L or V
  MISC_FEATURE (7)..(7): X is I, L or V
  MISC_FEATURE (8)..(8): X is C or S
  MISC_FEATURE (9)..(9): X is F, W or Y for aromatic amino acids
  MISC_FEATURE (10)..(10): X is T or S
  MISC_FEATURE (11)..(11): X is A or G
  MISC_FEATURE (12)..(12): X is D and E for acidic amino acids
  MISC_FEATURE (13)..(13): X is D and E for acidic amino acids
  MISC_FEATURE (14)..(14): X is K, R or H for basic amino acids
  MISC_FEATURE (15)..(15): X is A or G
  MISC_FEATURE (16)..(16): X is A or G
  MISC_FEATURE (17)..(17): X is I, L or V
  MISC_FEATURE (18)..(18): X is F, W or Y for aromatic amino acids
  MISC_FEATURE (19)..(19): X is K, R or H for basic amino acids
  MISC_FEATURE (20)..(20): X is A and G
  MISC_FEATURE (21)..(21): X is A or G
  MISC_FEATURE (22)..(22): X is A and G
  MISC_FEATURE (23)..(23): X is D and E for acidic amino acids
  MISC_FEATURE (24)..(24): X is A and G
  MISC_FEATURE (25)..(25): X is N or Q for amidated amino acids
  MISC_FEATURE (26)..(26): X is D and E for acidic amino acids
  MISC_FEATURE (27)..(27): X is D andE for acidic amino acids
  MISC_FEATURE (28)..(28): X is K, R or H for basic amino acids
  MISC_FEATURE (29)..(29): X is A and G
  MISC_FEATURE (30)..(30): X is A and G
  MISC_FEATURE (31)..(31): X is I, L or V
  MISC_FEATURE (32)..(32): X is I, L or V
  MISC_FEATURE (33)..(33): X is C or S
  MISC_FEATURE (34)..(34): X is T or S
  MISC_FEATURE (35)..(35): X is A or G
  MISC_FEATURE (36)..(36): X is I, L or V
  MISC_FEATURE (37)..(37): X is I, L or V

SEQ ID NO: 239 - protein, 32 aa, Artificial
  Completely synthesized peptide construct
SLKLMATLFSTYASGGGDGQEEKAGVVSTGLI

SEQ ID NO: 240 - protein, 32 aa, Artificial; identical to SEQ ID NO: 160
  peptide construct
  MISC_FEATURE (1)..(1): X is C or S
  MISC_FEATURE (2)..(2): X is I, L or V
  MISC_FEATURE (3)..(3): X is K, R or H for basic amino acids
  MISC_FEATURE (4)..(4): X is I, L or V
  MISC_FEATURE (5)..(5): X is M or Nle
  MISC_FEATURE (6)..(6): X is A or G
  MISC_FEATURE (7)..(7): X is T or S
  MISC_FEATURE (8)..(8): X is I, L or V
  MISC_FEATURE (9)..(9): X is F or P
  MISC_FEATURE (10)..(10): X is C or S
  MISC_FEATURE (11)..(11): X is T or S
  MISC_FEATURE (12)..(12): X is F, W or Y for aromatic amino acids
  MISC_FEATURE (13)..(13): X is A or G
  MISC_FEATURE (14)..(14): X is C or S
  MISC_FEATURE (15)..(15): X is A and G
  MISC_FEATURE (16)..(16): X is A or G
  MISC_FEATURE (17)..(17): X is A and G
  MISC_FEATURE (18)..(18): X is D and E for acidic amino acids
  MISC_FEATURE (19)..(19): X is A and G
  MISC_FEATURE (20)..(20): X is N or Q for amidated amino acids
  MISC_FEATURE (21)..(21): X is D and E for acidic amino acids
  MISC_FEATURE (22)..(22): X is D and E for acidic amino acids
  MISC_FEATURE (23)..(23): X is K, R or H for basic amino acids
  MISC_FEATURE (24)..(24): X is A and G
  MISC_FEATURE (25)..(25): X is A and G
  MISC_FEATURE (26)..(26): X is I, L or V
  MISC_FEATURE (27)..(27): X is I, L or V
  MISC_FEATURE (28)..(28): X is C or S
  MISC_FEATURE (29)..(29): X is T or S
  MISC_FEATURE (30)..(30): X is A and G
  MISC_FEATURE (31)..(31): X is I, L or V
  MISC_FEATURE (32)..(32): X is I, L or V

SEQ ID NO: 241 - protein, 32 aa, Artificial
  Completely synthesized peptide construct
SLKLMATLFSSYATGGGDGQEEKAGVVSTGLI

SEQ ID NO: 242 - protein, 32 aa, Artificial; identical to SEQ ID NO: 160
  peptide construct
  MISC_FEATURE (1)..(1): X is C or S
  MISC_FEATURE (2)..(2): X is I, L or V
  MISC_FEATURE (3)..(3): X is K, R or H for basic amino acids
  MISC_FEATURE (4)..(4): X is I, L or V
  MISC_FEATURE (5)..(5): X is M or Nle
  MISC_FEATURE (6)..(6): X is A or G
  MISC_FEATURE (7)..(7): X is T or S
  MISC_FEATURE (8)..(8): X is I, L or V
  MISC_FEATURE (9)..(9): X is F or P
  MISC_FEATURE (10)..(10): X is C or S
  MISC_FEATURE (11)..(11): X is C or S
  MISC_FEATURE (12)..(12): X is F, W or  Y for aromatic amino acids
  MISC_FEATURE (13)..(13): X is A or G
  MISC_FEATURE (14)..(14): X is T or S
  MISC_FEATURE (15)..(15): X is A and G
  MISC_FEATURE (16)..(16): X is A and G
  MISC_FEATURE (17)..(17): X is A or G
  MISC_FEATURE (18)..(18): X is D and E for acidic amino acids
  MISC_FEATURE (19)..(19): X is A and G
  MISC_FEATURE (20)..(20): X is N or Q for amidated amino acids
  MISC_FEATURE (21)..(21): X is D and E for acidic amino acids
  MISC_FEATURE (22)..(22): X is D and E for acidic amino acids
  MISC_FEATURE (23)..(23): X is K, R or H for basic amino acids
  MISC_FEATURE (24)..(24): X is A and G
  MISC_FEATURE (25)..(25): X is A and G
  MISC_FEATURE (26)..(26): X is I, L or V
  MISC_FEATURE (27)..(27): X is I, L or V
  MISC_FEATURE (28)..(28): X is C or S
  MISC_FEATURE (29)..(29): X is T or S
  MISC_FEATURE (30)..(30): X is A and G
  MISC_FEATURE (31)..(31): X is I, L or V
  MISC_FEATURE (32)..(32): X is I, L or V

SEQ ID NO: 243 - protein, 30 aa, Artificial
  Completely synthesized peptide construct
NITEAIADLTQKGGGDGQEEKAGVVSTGLI

SEQ ID NO: 244 - protein, 29 aa, Artificial
  peptide construct
  MISC_FEATURE (1)..(1): X is N or Q for amidated amino acids
  MISC_FEATURE (2)..(2): X is I, L or V
  MISC_FEATURE (3)..(3): X is T or S
  MISC_FEATURE (4)..(4): X is D and E for acidic amino acids
  MISC_FEATURE (5)..(5): X is I, L or V
  MISC_FEATURE (6)..(6): X is A or G
  MISC_FEATURE (7)..(7): X is D and E for acidic amino acids
  MISC_FEATURE (8)..(8): X is I, L or V
  MISC_FEATURE (9)..(9): X is  T or S
  MISC_FEATURE (10)..(10): X is N or Q for amidated amino acids
  MISC_FEATURE (11)..(11): X is K, R or H for basic amino acids
  MISC_FEATURE (12)..(12): X is A and G
  MISC_FEATURE (13)..(13): X is A or G
  MISC_FEATURE (14)..(14): X is A and G
  MISC_FEATURE (15)..(15): X is D and E for acidic amino acids
  MISC_FEATURE (16)..(16): X is A and G
  MISC_FEATURE (17)..(17): X is N or Q for amidated amino acids
  MISC_FEATURE (18)..(18): X is D and E for acidic amino acids
  MISC_FEATURE (19)..(19): X is D and E for acidic amino acids
  MISC_FEATURE (20)..(20): X is K, R or H for basic amino acids
  MISC_FEATURE (21)..(21): X is A and G
  MISC_FEATURE (22)..(22): X is A and G
  MISC_FEATURE (23)..(23): X is I, L or V
  MISC_FEATURE (24)..(24): X is I, L or V
  MISC_FEATURE (25)..(25): X is C or S
  MISC_FEATURE (26)..(26): X is T or S
  MISC_FEATURE (27)..(27): X is A and G
  MISC_FEATURE (28)..(28): X is I, L or V
  MISC_FEATURE (29)..(29): X is I, L or V
XXXXXXXXXXXXXXXXXXXXXXXXXXXXX

SEQ ID NO: 245 - protein, 58 aa, Artificial
  Completely synthesized peptide construct
NMYAMMIARFKMFPEVKEKGMAALPRLIAFTSEHSHFSLKGGGDGQEEKAGVVSTGLI

SEQ ID NO: 246 - protein, 58 aa, Artificial; identical to SEQ ID NO: 142
  peptide construct
  MISC_FEATURE (1)..(1): X is N or Q for amidated amino acids
  MISC_FEATURE (2)..(2): X is M or Nle
  MISC_FEATURE (3)..(3): X is F, W or Y for aromatic amino acids
  MISC_FEATURE (4)..(4): X is A or G
  MISC_FEATURE (5)..(5): X is M or Nle
  MISC_FEATURE (6)..(6): Xis M or Nle
  MISC_FEATURE (7)..(7): X is I, L or V
  MISC_FEATURE (8)..(8): X is A or G
  MISC_FEATURE (9)..(9): X is K, R or H for basic amino acids
  MISC_FEATURE (10)..(10): X is F, W or Y for aromatic amino acids
  MISC_FEATURE (11)..(11): X is K, R or H for basic amino acids
  MISC_FEATURE (12)..(12): X is M or Nle
  MISC_FEATURE (13)..(13): X is F, W or Y for aromatic amino acids
  MISC_FEATURE (14)..(14): X is F or P
  MISC_FEATURE (15)..(15): X is D and E for acidic amino acids
  MISC_FEATURE (16)..(16): X is I, L or V
  MISC_FEATURE (17)..(17): X is K, R or H for basic amino acids
  MISC_FEATURE (18)..(18): X is D and E for acidic amino acids
  MISC_FEATURE (19)..(19): X is K, R or H for basic amino acids
  MISC_FEATURE (20)..(20): X is A or G
  MISC_FEATURE (21)..(21): X is M or Nle
  MISC_FEATURE (22)..(22): X is A or G
  MISC_FEATURE (23)..(23): X is A or G
  MISC_FEATURE (24)..(24): X is I, L or V
  MISC_FEATURE (25)..(25): X is F or P
  MISC_FEATURE (26)..(26): X is K, R or H for basic amino acids
  MISC_FEATURE (27)..(27): X is I, L or V
  MISC_FEATURE (28)..(28): X is I, L or V
  MISC_FEATURE (29)..(29): X is A or G
  MISC_FEATURE (30)..(30): X is F, W or  Y for aromatic amino acids
  MISC_FEATURE (31)..(31): X is T or S
  MISC_FEATURE (32)..(32): X is C or S
  MISC_FEATURE (33)..(33): X is D and E for acidic amino acids
  MISC_FEATURE (34)..(34): X is K, R or H for basic amino acids
  MISC_FEATURE (35)..(35): X is C or S
  MISC_FEATURE (36)..(36): X is K, R or H for basic amino acids
  MISC_FEATURE (37)..(37): X is F, W or Y aromatic amino acids
  MISC_FEATURE (38)..(38): X is C or S
  MISC_FEATURE (39)..(39): X is I, L or V
  MISC_FEATURE (40)..(40): X is K, R or H for basic amino acids
  MISC_FEATURE (41)..(41): X is A and G
  MISC_FEATURE (42)..(42): X is A or G
  MISC_FEATURE (43)..(43): X is A and G
  MISC_FEATURE (44)..(44): X is D and E for acidic amino acids
  MISC_FEATURE (45)..(45): X is A and G
  MISC_FEATURE (46)..(46): X is N or Q for amidated amino acids
  MISC_FEATURE (47)..(47): X is D and E for acidic amino acids
  MISC_FEATURE (48)..(48): X is D and E for acidic amino acids
  MISC_FEATURE (49)..(49): X is K, R or H for basic amino acids
  MISC_FEATURE (50)..(50): X is A and G
  MISC_FEATURE (51)..(51): X is A and G
  MISC_FEATURE (52)..(52): X is I, L or V
  MISC_FEATURE (53)..(53): X is I, L or V
  MISC_FEATURE (54)..(54): X is C or S
  MISC_FEATURE (55)..(55): X is T or S
  MISC_FEATURE (56)..(56): X is A or G
  MISC_FEATURE (57)..(57): X is I, L or V
  MISC_FEATURE (58)..(58): X is I, L or V

SEQ ID NO: 247 - protein, 52 aa, Artificial
  Completely synthesized peptide construct
IARFKMFPEVKEKGMAALPRLIAFTSEHSHFSLKGGGDGQEEKAGVVSTGLI

SEQ ID NO: 248 - protein, 52 aa, Artificial; identical to SEQ ID NO: 168
  peptide construct
  MISC_FEATURE (1)..(1): X is I, L or V
  MISC_FEATURE (2)..(2): X is A or G
  MISC_FEATURE (3)..(3): X is K, R or H for basic amino acids
  MISC_FEATURE (4)..(4): X is F, W or Y for aromatic amino acids
  MISC_FEATURE (5)..(5): X is K, R or H for basic amino acids
  MISC_FEATURE (6)..(6): X is M or Nle
  MISC_FEATURE (7)..(7): X is F, W or Y for aromatic amino acids
  MISC_FEATURE (8)..(8): X is F or P
  MISC_FEATURE (9)..(9): X is D and E for acidic amino acids
  MISC_FEATURE (10)..(10): X is I, L or V
  MISC_FEATURE (11)..(11): X is K, R or H for basic amino acids
  MISC_FEATURE (12)..(12): X is D and E for acidic amino acids
  MISC_FEATURE (13)..(13): X is K, R or H for basic amino acids
  MISC_FEATURE (14)..(14): X is A or G
  MISC_FEATURE (15)..(15): X is M or Nle
  MISC_FEATURE (16)..(16): X is A or G
  MISC_FEATURE (17)..(17): X is A or G
  MISC_FEATURE (18)..(18): X is I, L or V
  MISC_FEATURE (19)..(19): X is F or P
  MISC_FEATURE (20)..(20): X is K,  R or H for basic amino acids
  MISC_FEATURE (21)..(21): X is I, L or V
  MISC_FEATURE (22)..(22): X is I, L or V
  MISC_FEATURE (23)..(23): X is A or G
  MISC_FEATURE (24)..(24): X is F, W or Y for aromatic amino acids
  MISC_FEATURE (25)..(25): X is T or S
  MISC_FEATURE (26)..(26): X is C or S
  MISC_FEATURE (27)..(27): X is D and E for acidic amino acids
  MISC_FEATURE (28)..(28): X is K, R or H for basic amino acids
  MISC_FEATURE (29)..(29): X is C or S
  MISC_FEATURE (30)..(30): X is K, R or H for basic amino acids
  MISC_FEATURE (31)..(31): X is F, W or Y for aromatic amino acids
  MISC_FEATURE (32)..(32): X is C or S
  MISC_FEATURE (33)..(33): X is I, L or V
  MISC_FEATURE (34)..(34): X is K, R or H for basic amino acids
  MISC_FEATURE (35)..(35): X is A and G
  MISC_FEATURE (36)..(36): X is A or G
  MISC_FEATURE (37)..(37): X is A and G
  MISC_FEATURE (38)..(38): X is D and E for acidic amino acids
  MISC_FEATURE (39)..(39): X is A and G
  MISC_FEATURE (40)..(40): X is N or Q for amidated amino acids
  MISC_FEATURE (41)..(41): X is  D and E for acidic amino acids
  MISC_FEATURE (42)..(42): X is D and E for acidic amino acids
  MISC_FEATURE (43)..(43): X is K, R or H for basic amino acids
  MISC_FEATURE (44)..(44): X is A and G
  MISC_FEATURE (45)..(45): X is A and G
  MISC_FEATURE (46)..(46): X is I, L or V
  MISC_FEATURE (47)..(47): X is I, L or V
  MISC_FEATURE (48)..(48): X is C or S
  MISC_FEATURE (49)..(49): X is T or S
  MISC_FEATURE (50)..(50): X is A and G
  MISC_FEATURE (51)..(51): X is I, L or V
  MISC_FEATURE (52)..(52): X is I, L or V

SEQ ID NO: 249 - protein, 37 aa, Artificial
  Completely synthesized peptide construct
SRLSKVAPVIKARMMEYGTTGGDGQEEKAGVVSTGLI

SEQ ID NO: 250 - protein, 38 aa, Artificial; identical to SEQ ID NO: 170
  peptide construct
  MISC_FEATURE (1)..(1): X is C or S
  MISC_FEATURE (2)..(2): X is K, R or H for basic amino acids
  MISC_FEATURE (3)..(3): X is I, L or V
  MISC_FEATURE (4)..(4): X is C or S
  MISC_FEATURE (5)..(5): X is K, R or H for basic amino acids
  MISC_FEATURE (6)..(6): X is I, L or V
  MISC_FEATURE (7)..(7): X is A or G
  MISC_FEATURE (8)..(8): X is F or  P
  MISC_FEATURE (9)..(9): X is I, L or V
  MISC_FEATURE (10)..(10): X is I, L or V
  MISC_FEATURE (11)..(11): X is K, R or H for basic amino acids
  MISC_FEATURE (12)..(12): X is A or  G
  MISC_FEATURE (13)..(13): X is K, R or H for basic amino acids
  MISC_FEATURE (14)..(14): X is M or Nle
  MISC_FEATURE (15)..(15): X is M or Nle
  MISC_FEATURE (16)..(16): X is D and E for acidic amino acids
  MISC_FEATURE (17)..(17): X is F, W or Y for acidic amino acids
  MISC_FEATURE (18)..(18): X is A or G
  MISC_FEATURE (19)..(19): X is T or S
  MISC_FEATURE (20)..(20): X is T or S
  MISC_FEATURE (21)..(21): X is A and G
  MISC_FEATURE (22)..(22): X is A or  G
  MISC_FEATURE (23)..(23): X is A and G
  MISC_FEATURE (24)..(24): X is D and E for acidic amino acids
  MISC_FEATURE (25)..(25): X is A and G
  MISC_FEATURE (26)..(26): X is N or Q for amidated amino acids
  MISC_FEATURE (27)..(27): X is D and E for acidic amino acids
  MISC_FEATURE (28)..(28): X is D and E for acidic amino acids
  MISC_FEATURE (29)..(29): X is K, R or H for basic amino acids
  MISC_FEATURE (30)..(30): X is A and G
  MISC_FEATURE (31)..(31): X is A and G
  MISC_FEATURE (32)..(32): X is I, L or V
  MISC_FEATURE (33)..(33): X is I, L or V
  MISC_FEATURE (34)..(34): X is C or S
  MISC_FEATURE (35)..(35): X is T or S
  MISC_FEATURE (36)..(36): X is A and G
  MISC_FEATURE (37)..(37): X is I, L or V
  MISC_FEATURE (38)..(38): X is I, L or V

SEQ ID NO: 251 - protein, 37 aa, Artificial
  Completely synthesized peptide construct
IPPSLRYLEDEERMSRLSKGGGDGQEEKAGVVSTGLI

SEQ ID NO: 252 - protein, 36 aa, Artificial; identical to SEQ ID NO: 172
  peptide construct
  MISC_FEATURE (1)..(1): X is I, L or V
  MISC_FEATURE (2)..(2): X is F or P
  MISC_FEATURE (3)..(3): X is F or P
  MISC_FEATURE (4)..(4): X is C or S
  MISC_FEATURE (5)..(5): X is I, L or V
  MISC_FEATURE (6)..(6): X is K, R or H for basic amino acids
  MISC_FEATURE (7)..(7): X is F, W or Y for aromatic amino acids
  MISC_FEATURE (8)..(8): X is D and E for acidic amino acids
  MISC_FEATURE (9)..(9): X is D and E for acidic amino acids
  MISC_FEATURE (10)..(10): X is D and E for acidic amino acids
  MISC_FEATURE (11)..(11): X is D and E for acidic amino acids
  MISC_FEATURE (12)..(12): X is K, R or H for basic amino acids
  MISC_FEATURE (13)..(13): X is M or Nle
  MISC_FEATURE (14)..(14): X is C or S
  MISC_FEATURE (15)..(15): X is K, R or H for basic amino acids
  MISC_FEATURE (16)..(16): X is I, L or V
  MISC_FEATURE (17)..(17): X is C or S
  MISC_FEATURE (18)..(18): X is K, R or H for basic amino acids
  MISC_FEATURE (19)..(19): X is A and G
  MISC_FEATURE (20)..(20): X is A or G
  MISC_FEATURE (21)..(21): X is A and G
  MISC_FEATURE (22)..(22): X is D and E for acidic amino acids
  MISC_FEATURE (23)..(23): X is A and G
  MISC_FEATURE (24)..(24): X is N or Q for amidated amino acids
  MISC_FEATURE (25)..(25): X is D and E for acidic amino acids
  MISC_FEATURE (26)..(26): X is D and E for acidic amino acids
  MISC_FEATURE (27)..(27): X is K, R or H for basic amino acids
  MISC_FEATURE (28)..(28): X is A and G
  MISC_FEATURE (29)..(29): X is A and G
  MISC_FEATURE (30)..(30): X is I, L or V
  MISC_FEATURE (31)..(31): X is I, L or V
  MISC_FEATURE (32)..(32): X is C or S
  MISC_FEATURE (33)..(33): X is T or S
  MISC_FEATURE (34)..(34): X is A or G
  MISC_FEATURE (35)..(35): X is I, L or V
  MISC_FEATURE (36)..(36): X is I, L or V

SEQ ID NO: 253 - protein, 38 aa, Artificial
  Completely synthesized peptide construct
NTNMFTYEIAPVFVLLEYVTGGGDGQEEKAGVVSTGLI

SEQ ID NO: 254 - protein, 38 aa, Artificial; identical to SEQ ID NO: 170
  peptide construct
  MISC_FEATURE (1)..(1): X is N or Q for amidated amino acids
  MISC_FEATURE (2)..(2): X is T or S
  MISC_FEATURE (3)..(3): X is N or Q for amidated amino acids
  MISC_FEATURE (4)..(4): X is M or Nle
  MISC_FEATURE (5)..(5): X is F, W or Y for aromatic amino acids
  MISC_FEATURE (6)..(6): X is T or S
  MISC_FEATURE (7)..(7): X is F, W or Y for aromatic amino acids
  MISC_FEATURE (8)..(8): X is D and E for acidic amino acids
  MISC_FEATURE (9)..(9): X is I, L or V
  MISC_FEATURE (10)..(10): X is A or G
  MISC_FEATURE (11)..(11): X is F or P
  MISC_FEATURE (12)..(12): X is I, L or V
  MISC_FEATURE (13)..(13): X is F, W or Y for aromatic amino acids
  MISC_FEATURE (14)..(14): X is I, L or V
  MISC_FEATURE (15)..(15): X is I, L or V
  MISC_FEATURE (16)..(16): X is I, L or V
  MISC_FEATURE (17)..(17): X is D and E for acidic amino acids
  MISC_FEATURE (18)..(18): X is F, W or Y for aromatic amino acids
  MISC_FEATURE (19)..(19): X is I, L or V
  MISC_FEATURE (20)..(20): X is T or S
  MISC_FEATURE (21)..(21): X is A and G
  MISC_FEATURE (22)..(22): X is A or G
  MISC_FEATURE (23)..(23): X is A and G
  MISC_FEATURE (24)..(24): X is D and E for acidic amino acids
  MISC_FEATURE (25)..(25): X is A and G
  MISC_FEATURE (26)..(26): X is N or Q for amidated amino acids
  MISC_FEATURE (27)..(27): X is D and E for acidic amino acids
  MISC_FEATURE (28)..(28): X is D and E for acidic amino acids
  MISC_FEATURE (29)..(29): X is K, R or H for basic amino acids
  MISC_FEATURE (30)..(30): X is A and G
  MISC_FEATURE (31)..(31): X is A and G
  MISC_FEATURE (32)..(32): X is I, L or V
  MISC_FEATURE (33)..(33): X is I, L or V
  MISC_FEATURE (34)..(34): X is C or S
  MISC_FEATURE (35)..(35): X is T or C
  MISC_FEATURE (36)..(36): X is A or G
  MISC_FEATURE (37)..(37): X is I, L or V
  MISC_FEATURE (38)..(38): X is I, L or V

SEQ ID NO: 255 - protein, 33 aa, Artificial
  Completely synthesized peptide construct
FKADEKKFWGKYLYEGGGDGQEEKAGVVSTGLI

SEQ ID NO: 256 - protein, 33 aa, Artificial; identical to SEQ ID NO: 99
  peptide construct
  MISC_FEATURE (1)..(1): X is F, W or Y for aromatic amino acids
  MISC_FEATURE (2)..(2): X is K, R or H for basic amino acids
  MISC_FEATURE (3)..(3): X is A or G
  MISC_FEATURE (4)..(4): X is D and E for acidic amino acids
  MISC_FEATURE (5)..(5): X is D and E for acidic amino acids
  MISC_FEATURE (6)..(6): X is K, R or H for basic amino acids
  MISC_FEATURE (7)..(7): X is K, R or H for basic amino acids
  MISC_FEATURE (8)..(8): X is F, W or Y for aromatic amino acids
  MISC_FEATURE (9)..(9): X is F, W or Y for aromatic amino acids
  MISC_FEATURE (10)..(10): X is A or G
  MISC_FEATURE (11)..(11): X is K, R or H for basic amino acids
  MISC_FEATURE (12)..(12): X is F, W or Y for aromatic amino acids
  MISC_FEATURE (13)..(13): X is I, L or V
  MISC_FEATURE (14)..(14): X is F, W or Y for aromatic amino acids
  MISC_FEATURE (15)..(15): X is D and E for acidic amino acids
  MISC_FEATURE (16)..(16): X is A and G
  MISC_FEATURE (17)..(17): X is A or G
  MISC_FEATURE (18)..(18): X is A and G
  MISC_FEATURE (19)..(19): X is D and E for acidic amino acids
  MISC_FEATURE (20)..(20): X is A and G
  MISC_FEATURE (21)..(21): X is N or Q for amidated amino acids
  MISC_FEATURE (22)..(22): X is D and E for acidic amino acids
  MISC_FEATURE (23)..(23): X is D and E for acidic amino acids
  MISC_FEATURE (24)..(24): X is K, R or H for basic amino acids
  MISC_FEATURE (25)..(25): X is A and G
  MISC_FEATURE (26)..(26): X is A and G
  MISC_FEATURE (27)..(27): X is I, L or V
  MISC_FEATURE (28)..(28): X is I, L or V
  MISC_FEATURE (29)..(29): X is C or S
  MISC_FEATURE (30)..(30): X is T or S
  misc_feature (31)..(31): Xaa can be any naturally occurring amino acid
  MISC_FEATURE (32)..(32): X is A and G
  MISC_FEATURE (32)..(32): X is I, L or V
  MISC_FEATURE (33)..(33): X is I, L or V

SEQ ID NO: 257 - protein, 33 aa, Artificial
  Completely synthesized peptide construct
SHLVEALYLVCGERGGGGDGQEEKAGVVSTGLI

SEQ ID NO: 258 - protein, 32 aa, Artificial; identical to SEQ ID NO: 160
  peptide construct
  MISC_FEATURE (1)..(1): X is C or S
  MISC_FEATURE (2)..(2): X is K, R or H for basic amino acids
  MISC_FEATURE (3)..(3): X is I, L or V
  MISC_FEATURE (4)..(4): X is I, L or V
  MISC_FEATURE (5)..(5): X is D and E for acidic amino acids
  MISC_FEATURE (6)..(6): X is A or G
  MISC_FEATURE (7)..(7): X is I, L or V
  MISC_FEATURE (8)..(8): X is F, W or Y for aromatic amino acids
  MISC_FEATURE (9)..(9): X is I, L or V
  MISC_FEATURE (10)..(10): X is C or S
  MISC_FEATURE (11)..(11): X is A or G
  MISC_FEATURE (12)..(12): X is D and E for acidic amino acids
  MISC_FEATURE (13)..(13): X is K, R or H for basic amino acids
  MISC_FEATURE (14)..(14): X is A or G
  MISC_FEATURE (15)..(15): X is A and G
  MISC_FEATURE (16)..(16): X is A or G
  MISC_FEATURE (17)..(17): X is A and G
  MISC_FEATURE (18)..(18): X is D and E for acidic amino acids
  MISC_FEATURE (19)..(19): X is A and G
  MISC_FEATURE (20)..(20): X is N or Q for amidated amino acids
  MISC_FEATURE (21)..(21): X is D and E for acidic amino acids
  MISC_FEATURE (22)..(22): X is D and E for acidic amino acids
  MISC_FEATURE (23)..(23): X is K, R or H for basic amino acids
  MISC_FEATURE (24)..(24): X is A and G
  MISC_FEATURE (25)..(25): X is A and G
  MISC_FEATURE (26)..(26): X is I, L or V
  MISC_FEATURE (27)..(27): X is I, L or V
  MISC_FEATURE (28)..(28): X is C or S
  MISC_FEATURE (29)..(29): X is T or S
  MISC_FEATURE (30)..(30): X is A and G
  MISC_FEATURE (31)..(31): X is I, L or V
  MISC_FEATURE (32)..(32): X is I, L or V

SEQ ID NO: 259 - protein, 42 aa, Artificial
  Completely synthesized peptide construct
VLGGGCALLRCIPALDSLTPANEDGGGDGQEEKAGVVSTGLI

SEQ ID NO: 260 - protein, 42 aa, Artificial; identical to SEQ ID NO: 180
  peptide construct
  MISC_FEATURE (1)..(1): X is I, L or V
  MISC_FEATURE (2)..(2): X is I, L or V
  MISC_FEATURE (3)..(3): X is A or G
  MISC_FEATURE (4)..(4): X is A or G
  MISC_FEATURE (5)..(5): X is A or G
  MISC_FEATURE (6)..(6): X is C or S
  MISC_FEATURE (7)..(7): X is A or G
  MISC_FEATURE (8)..(8): X is I, L or V
  MISC_FEATURE (9)..(9): X is I, L or V
  MISC_FEATURE (10)..(10): X is K, R or H for basic amino acids
  MISC_FEATURE (11)..(11): X is C or S
  MISC_FEATURE (12)..(12): X is I, L or V
  MISC_FEATURE (13)..(13): X is F or P
  MISC_FEATURE (14)..(14): X is A or G
  MISC_FEATURE (15)..(15): X is I, L or V
  MISC_FEATURE (16)..(16): X is D and E for acidic amino acids
  MISC_FEATURE (17)..(17): X is C or S
  MISC_FEATURE (18)..(18): X is I, L or V
  MISC_FEATURE (19)..(19): X is T or S
  MISC_FEATURE (20)..(20): X is F or P
  MISC_FEATURE (21)..(21): X is A or G
  MISC_FEATURE (22)..(22): X is N or Q for amidated amino acids
  MISC_FEATURE (23)..(23): X is D and E for acidic amino acids
  MISC_FEATURE (24)..(24): X is D and E for acidic amino acids
  MISC_FEATURE (25)..(25): X is A and G
  MISC_FEATURE (26)..(26): X is A or G
  MISC_FEATURE (27)..(27): X is A and G
  MISC_FEATURE (28)..(28): X is D and E for acidic amino acids
  MISC_FEATURE (29)..(29): X is A and G
  MISC_FEATURE (30)..(30): X is N or Q for amidated amino acids
  MISC_FEATURE (31)..(31): X is D and E for acidic amino acids
  MISC_FEATURE (32)..(32): X is D and E for acidic amino acids
  MISC_FEATURE (33)..(33): X is K, R or H for basic amino acids
  MISC_FEATURE (34)..(34): X is A and G
  MISC_FEATURE (35)..(35): X is A and G
  MISC_FEATURE (36)..(36): X is I, L or V
  MISC_FEATURE (37)..(37): X is I, L or V
  MISC_FEATURE (38)..(38): X is C or S
  MISC_FEATURE (39)..(39): X is T or S
  MISC_FEATURE (40)..(40): X is A or G
  MISC_FEATURE (41)..(41): X is I, L or V
  MISC_FEATURE (42)..(42): X is I, L or V

SEQ ID NO: 261 - protein, 46 aa, Artificial
  Completely synthesized peptide construct
EACVTSWLWSGEGAVFYRVDLHFINLGTGGGDGQEEKAGVVSTGLI

SEQ ID NO: 262 - protein, 46 aa, Artificial; identical to SEQ ID NO: 144
  peptide construct
  MISC_FEATURE (1)..(1): X is D and E for acidic amino acids
  MISC_FEATURE (2)..(2): X is  A or G
  MISC_FEATURE (3)..(3): X is C or S
  MISC_FEATURE (4)..(4): X is I, L or V
  MISC_FEATURE (5)..(5): X is T or S
  MISC_FEATURE (6)..(6): X is C or S
  MISC_FEATURE (7)..(7): X is F, W or Y for aromatic amino acids
  MISC_FEATURE (8)..(8): X is I, L or V
  MISC_FEATURE (9)..(9): X is F, W or Y for aromatic amino acids
  MISC_FEATURE (10)..(10): X is C or S
  MISC_FEATURE (11)..(11): X is A or  G
  MISC_FEATURE (12)..(12): X is D and E for acidic amino acids
  MISC_FEATURE (13)..(13): X is A or G
  MISC_FEATURE (14)..(14): X is A or G
  MISC_FEATURE (15)..(15): X is I, L or V
  MISC_FEATURE (16)..(16): X is F, W or Y for aromatic amino acids
  MISC_FEATURE (17)..(17): X is F, W or Y for aromatic amino acids
  MISC_FEATURE (18)..(18): X is K, R or H for basic amino acids
  MISC_FEATURE (19)..(19): X is I, L or V
  MISC_FEATURE (20)..(20): X is D and E for acidic amino acids
  MISC_FEATURE (21)..(21): X is I, L or V
  MISC_FEATURE (22)..(22): X is K, R or H for basic amino acids
  MISC_FEATURE (23)..(23): X is F, W or Y for aromatic amino acids
  MISC_FEATURE (24)..(24): X is I, L or V
  MISC_FEATURE (25)..(25): X is N or Q for amidated amino acids
  MISC_FEATURE (26)..(26): X is I, L or V
  MISC_FEATURE (27)..(27): X is A or G
  MISC_FEATURE (28)..(28): X is T or S
  MISC_FEATURE (29)..(29): X is A and G
  MISC_FEATURE (30)..(30): X is A or G
  MISC_FEATURE (31)..(31): X is A or G
  MISC_FEATURE (32)..(32): X is D and E for acidic amino acids
  MISC_FEATURE (33)..(33): X is A and G
  MISC_FEATURE (34)..(34): X is N or Q for amidated amino acids
  MISC_FEATURE (35)..(35): X is D and E for acidic amino acids
  MISC_FEATURE (36)..(36): X is D and E for acidic amino acids
  MISC_FEATURE (37)..(37): X is K, R or H for basic amino acids
  MISC_FEATURE (38)..(38): X is A and G
  MISC_FEATURE (39)..(39): X is A and G
  MISC_FEATURE (40)..(40): X is I, L or V
  MISC_FEATURE (41)..(41): X is I, L or V
  MISC_FEATURE (42)..(42): X is C or S
  MISC_FEATURE (43)..(43): X is T or S
  MISC_FEATURE (44)..(44): X is A and G
  MISC_FEATURE (45)..(45): X is I, L or V
  MISC_FEATURE (46)..(46): X is I, L or V

SEQ ID NO: 263 - protein, 39 aa, Artificial
  Completely synthesized peptide construct
MDFWCVEHDRPPPATPTSLTTGGGDGQEEKAGVVSTGLI

SEQ ID NO: 264 - protein, 39 aa, Artificial; identical to SEQ ID NO: 184
  peptide construct
  MISC_FEATURE (1)..(1): X is M or Nle
  MISC_FEATURE (2)..(2): X is D and E for acidic amino acids
  MISC_FEATURE (3)..(3): X is F, W or Y for aromatic amino acids
  MISC_FEATURE (4)..(4): X is F, W or Y for aromatic amino acids
  MISC_FEATURE (5)..(5): X is C or S
  MISC_FEATURE (6)..(6): X is I, L or V
  MISC_FEATURE (7)..(7): X is D and E for acidic amino acids
  MISC_FEATURE (8)..(8): X is K, R or H for basic amino acids
  MISC_FEATURE (9)..(9): X is D and E for acidic amino acids
  MISC_FEATURE (10)..(10): X is K, R or H for basic amino acids
  MISC_FEATURE (11)..(11): X is F or P
  MISC_FEATURE (12)..(12): X is F or P
  MISC_FEATURE (13)..(13): X is F or P
  MISC_FEATURE (14)..(14): X is A or G
  MISC_FEATURE (15)..(15): X is T or S
  MISC_FEATURE (16)..(16): X is F or P
  MISC_FEATURE (17)..(17): X is T or S
  MISC_FEATURE (18)..(18): X is C or S
  MISC_FEATURE (19)..(19): X is I, L or V
  MISC_FEATURE (20)..(20): X is T or S
  MISC_FEATURE (21)..(21): X is T or S
  MISC_FEATURE (22)..(22): X is A and G
  MISC_FEATURE (23)..(23): X is A or G
  MISC_FEATURE (24)..(24): X is A and G
  MISC_FEATURE (25)..(25): X is D and E for acidic amino acids
  MISC_FEATURE (26)..(26): X is A and G
  MISC_FEATURE (27)..(27): X is N or Q for amidated amino acids
  MISC_FEATURE (28)..(28): X is D and E for acidic amino acids
  MISC_FEATURE (29)..(29): X is D and E for acidic amino acids
  MISC_FEATURE (30)..(30): X is K, R or H for basic amino acids
  MISC_FEATURE (31)..(31): X is A and G
  MISC_FEATURE (32)..(32): X is A and G
  MISC_FEATURE (33)..(33): X is I, L or V
  MISC_FEATURE (34)..(34): X is I, L or V
  MISC_FEATURE (35)..(35): X is C or S
  MISC_FEATURE (36)..(36): X is T or S
  MISC_FEATURE (37)..(37): X is A and G
  MISC_FEATURE (38)..(38): X is I, L or V
  MISC_FEATURE (39)..(39): X is I, L or V

SEQ ID NO: 265 - protein, 38 aa, Artificial
  Completely synthesized peptide construct
NMYAMMIARFKMFPEVKEKGGGGDGQEEKAGVVSTGLI

SEQ ID NO: 266 - protein, 38 aa, Artificial; identical to SEQ ID NO: 170
  peptide construct
  MISC_FEATURE (1)..(1): X is N or Q for amidated amino acids
  MISC_FEATURE (2)..(2): X is M or Nle
  MISC_FEATURE (3)..(3): X is F, W or Y for aromatic amino acids
  MISC_FEATURE (4)..(4): X is A or G
  MISC_FEATURE (5)..(5): X is M or Nle
  MISC_FEATURE (6)..(6): X is M or Nle
  MISC_FEATURE (7)..(7): X is I, L or V
  MISC_FEATURE (8)..(8): X is A or G
  MISC_FEATURE (9)..(9): X is K, R or H for basic amino acids
  MISC_FEATURE (10)..(10): X is F, W or Y for aromatic amino acids
  MISC_FEATURE (11)..(11): X is K, R or H for basic amino acids
  MISC_FEATURE (12)..(12): X is M or Nle
  MISC_FEATURE (13)..(13): X is F, W or Y for aromatic amino acids
  MISC_FEATURE (14)..(14): X is F or P
  MISC_FEATURE (15)..(15): X is D and E for acidic amino acids
  MISC_FEATURE (16)..(16): X is I, L or V
  MISC_FEATURE (17)..(17): X is K, R or H for basic amino acids
  MISC_FEATURE (18)..(18): X is D and E for acidic amino acids
  MISC_FEATURE (19)..(19): X is K, R or H for basic amino acids
  MISC_FEATURE (20)..(20): X is A or G
  MISC_FEATURE (21)..(21): X is A and G
  MISC_FEATURE (22)..(22): X is A or G
  MISC_FEATURE (23)..(23): X is A and G
  MISC_FEATURE (24)..(24): X is D and E for acidic amino acids
  MISC_FEATURE (25)..(25): X is A and G
  MISC_FEATURE (26)..(26): X is N or Q for amidated amino acids
  MISC_FEATURE (27)..(27): X is D and E for acidic amino acids
  MISC_FEATURE (28)..(28): X is D and E for acidic amino acids
  MISC_FEATURE (29)..(29): X is K, R or H for basic amino acids
  MISC_FEATURE (30)..(30): X is A and G
  MISC_FEATURE (31)..(31): X is A and G
  MISC_FEATURE (32)..(32): X is I, L or V
  MISC_FEATURE (33)..(33): X is I, L or V
  MISC_FEATURE (34)..(34): X is C or S
  MISC_FEATURE (35)..(35): X is T or S
  MISC_FEATURE (36)..(36): X is A or G
  MISC_FEATURE (37)..(37): X is I, L or V
  MISC_FEATURE (38)..(38): X is I, L or V

SEQ ID NO: 267 - protein, 51 aa, Artificial
  Completely synthesized peptide construct
NMYAMMIARFKMFPEVKEKGMAALPRLIAFTSEGGGDGQEEKAGVVSTGLI

SEQ ID NO: 268 - protein, 51 aa, Artificial; identical to SEQ ID NO: 188
  peptide construct
  MISC_FEATURE (1)..(1): X is N or Q for amidated amino acids
  MISC_FEATURE (2)..(2): X is M or Nle
  MISC_FEATURE (3)..(3): X is F, W or Y for aromatic amino acids
  MISC_FEATURE (4)..(4): X is A or G
  MISC_FEATURE (5)..(5): X is M or Nle
  MISC_FEATURE (6)..(6): X is M or Nle
  MISC_FEATURE (7)..(7): X is I, L or V
  MISC_FEATURE (8)..(8): X is A or G
  MISC_FEATURE (9)..(9): X is K, R or H for basic amino acids
  MISC_FEATURE (10)..(10): X is F, W or Y for aromatic amino acids
  MISC_FEATURE (11)..(11): X is K, R or H for basic amino acids
  MISC_FEATURE (12)..(12): X is M or Nle
  MISC_FEATURE (13)..(13): X is F, W or Y for aromatic amino acids
  MISC_FEATURE (14)..(14): X is F or P
  MISC_FEATURE (15)..(15): X is D and E for acidic amino acids
  MISC_FEATURE (16)..(16): X is I, L or V
  MISC_FEATURE (17)..(17): X is K, R or H for basic amino acids
  MISC_FEATURE (18)..(18): X is D and E for acidic amino acids
  MISC_FEATURE (19)..(19): X is K, R or H for basic amino acids
  MISC_FEATURE (20)..(20): X is A or G
  MISC_FEATURE (21)..(21): X is M or Nle
  MISC_FEATURE (22)..(22): X is A or G
  MISC_FEATURE (23)..(23): X is A or G
  MISC_FEATURE (24)..(24): X is I, L or V
  MISC_FEATURE (25)..(25): X is F or P
  MISC_FEATURE (26)..(26): X is K, R or H for basic amino acids
  MISC_FEATURE (27)..(27): X is I, L or V
  MISC_FEATURE (28)..(28): X is I, L or V
  MISC_FEATURE (29)..(29): X is A or G
  MISC_FEATURE (30)..(30): X is F, W or Y for aromatic amino acids
  MISC_FEATURE (31)..(31): X is T or S
  MISC_FEATURE (32)..(32): X is C or S
  MISC_FEATURE (33)..(33): X is D and E for acidic amino acids
  MISC_FEATURE (34)..(34): X is A and G
  MISC_FEATURE (35)..(35): X is A or G
  MISC_FEATURE (36)..(36): X is A and G
  MISC_FEATURE (37)..(37): X is D and E for acidic amino acids
  MISC_FEATURE (38)..(38): X is A and G
  MISC_FEATURE (39)..(39): X is N or Q for amidated amino acids
  MISC_FEATURE (40)..(40): X is D and E for acidic amino acids
  MISC_FEATURE (41)..(41): X is D and E for acidic amino acids
  MISC_FEATURE (42)..(42): X is K, R or H for basic amino acids
  MISC_FEATURE (43)..(43): X is A and G
  MISC_FEATURE (44)..(44): X is A and G
  MISC_FEATURE (45)..(45): X is I, L or V
  MISC_FEATURE (46)..(46): X is I, L or V
  MISC_FEATURE (47)..(47): X is C or S
  MISC_FEATURE (48)..(48): X is T or S
  MISC_FEATURE (49)..(49): X is A and G
  MISC_FEATURE (50)..(50): X is I, L or V
  MISC_FEATURE (51)..(51): X is I, L or V

SEQ ID NO: 269 - protein, 31 aa, Artificial
  Completely synthesized peptide construct
IAFTSEHSHFSLKGGGDGQEEKAGVVSTGLI

SEQ ID NO: 270 - protein, 31 aa, Artificial; identical to SEQ ID NO: 130
  peptide construct
  MISC_FEATURE (1)..(1): X is I, L or V
  MISC_FEATURE (2)..(2): X is A or G
  MISC_FEATURE (3)..(3): X is F, W or Y for aromatic amino acids
  MISC_FEATURE (4)..(4): X is T or S
  MISC_FEATURE (5)..(5): X is C or S
  MISC_FEATURE (6)..(6): X is D and E for acidic amino acids
  MISC_FEATURE (7)..(7): X is K, R or H for basic amino acids
  MISC_FEATURE (8)..(8): X is C or S
  MISC_FEATURE (9)..(9): X is K, R or H for basic amino acids
  MISC_FEATURE (10)..(10): X is F, W or Y for aromatic amino acids
  MISC_FEATURE (11)..(11): X is C or S
  MISC_FEATURE (12)..(12): X is I, L or V
  MISC_FEATURE (13)..(13): X is K, R or H for basic amino acids
  MISC_FEATURE (14)..(14): X is A and G
  MISC_FEATURE (15)..(15): X is A or G
  MISC_FEATURE (16)..(16): X is A and G
  MISC_FEATURE (17)..(17): X is D and E for acidic amino acids
  MISC_FEATURE (18)..(18): X is A and G
  MISC_FEATURE (19)..(19): X is N or Q for amidated amino acids
  MISC_FEATURE (20)..(20): X is D or E for acidic amino acids
  MISC_FEATURE (21)..(21): X is D and E for acidic amino acids
  MISC_FEATURE (22)..(22): X is K, R or H for basic amino acids
  MISC_FEATURE (23)..(23): X is A and G
  MISC_FEATURE (24)..(24): X is A and G
  MISC_FEATURE (25)..(25): X is I, L or V
  MISC_FEATURE (26)..(26): X is I, L or V
  MISC_FEATURE (27)..(27): X is C or S
  MISC_FEATURE (28)..(28): X is T or S
  MISC_FEATURE (29)..(29): X is A or G
  MISC_FEATURE (30)..(30): X is I, L or V
  MISC_FEATURE (31)..(31): X is I, L or V

SEQ ID NO: 271 - protein, 39 aa, Artificial; identical to SEQ ID NO: 263
  Completely synthesized peptide construct

SEQ ID NO: 272 - protein, 39 aa, Artificial; identical to SEQ ID NO: 184
  peptide construct
  MISC_FEATURE (1)..(1): X is M or Nle
  MISC_FEATURE (2)..(2): X is D and E for acidic amino acids
  MISC_FEATURE (3)..(3): X is F, W or Y for aromatic amino acids
  MISC_FEATURE (4)..(4): X is F, W or Y for aromatic amino acids
  MISC_FEATURE (5)..(5): X is C or S
  MISC_FEATURE (6)..(6): X is I, L or V
  MISC_FEATURE (7)..(7): X is D and E for acidic amino acids
  MISC_FEATURE (8)..(8): X is K, R or H for basic amino acids
  MISC_FEATURE (9)..(9): X is D and E for acidic amino acids
  MISC_FEATURE (10)..(10): X is K, R or H for basic amino acids
  MISC_FEATURE (11)..(11): X is F or P
  MISC_FEATURE (12)..(12): X is F or P
  MISC_FEATURE (13)..(13): X is F or P
  MISC_FEATURE (14)..(14): X is A or G
  MISC_FEATURE (15)..(15): X is T or S
  MISC_FEATURE (16)..(16): X is F or P
  MISC_FEATURE (17)..(17): X is T or S
  MISC_FEATURE (18)..(18): X is C or S
  MISC_FEATURE (19)..(19): X is I, L or V
  MISC_FEATURE (20)..(20): X is T or S
  MISC_FEATURE (21)..(21): X is T or S
  MISC_FEATURE (22)..(22): X is A and G
  MISC_FEATURE (23)..(23): X is A or G
  MISC_FEATURE (24)..(24): X is A and G
  MISC_FEATURE (25)..(25): X is D and E for acidic amino acids
  MISC_FEATURE (26)..(26): X is A and G
  MISC_FEATURE (27)..(27): X is N or Q for amidated amino acids
  MISC_FEATURE (28)..(28): X is D and E for acidic amino acids
  MISC_FEATURE (29)..(29): X is D and E for acidic amino acids
  MISC_FEATURE (30)..(30): X is K, R or H for basic amino acids
  MISC_FEATURE (31)..(31): X is A and G
  MISC_FEATURE (32)..(32): X is A and G
  MISC_FEATURE (33)..(33): X is I, l or V
  MISC_FEATURE (34)..(34): X is I, L or V
  MISC_FEATURE (35)..(35): X is C or S
  MISC_FEATURE (36)..(36): X is T or S
  MISC_FEATURE (37)..(37): X is A and G
  MISC_FEATURE (38)..(38): X is I, L or V
  MISC_FEATURE (39)..(39): X is I, L or V

SEQ ID NO: 273 - protein, 28 aa, Artificial
  Completely synthesized peptide construct
ERPTLAFLQDGGGDGQEEKAGVVSTGLI

SEQ ID NO: 274 - protein, 28 aa, Artificial
  peptide construct
  MISC_FEATURE (1)..(1): X is D and E for acidic amino acids
  MISC_FEATURE (2)..(2): X is K, R or H for basic amino acids
  MISC_FEATURE (3)..(3): X is F or P
  MISC_FEATURE (4)..(4): X is T or S
  MISC_FEATURE (5)..(5): X is I, L or V
  MISC_FEATURE (6)..(6): X is A or G
  MISC_FEATURE (7)..(7): X is F, W or Y for aromatic amino acids
  MISC_FEATURE (8)..(8): X is I, L or V
  MISC_FEATURE (9)..(9): X is N or Q for amidated amino acids
  MISC_FEATURE (10)..(10): X is D and E for acidic amino acids
  MISC_FEATURE (11)..(11): X is A and G
  MISC_FEATURE (12)..(12): X is A or G
  MISC_FEATURE (13)..(13): X is A and G
  MISC_FEATURE (14)..(14): X is D and E for acidic amino acids
  MISC_FEATURE (15)..(15): X is A and G
  MISC_FEATURE (16)..(16): X is N or Q for amidated amino acids
  MISC_FEATURE (17)..(17): X is D and E for acidic amino acids
  MISC_FEATURE (18)..(18): X is D and E for acidic amino acids
  MISC_FEATURE (19)..(19): X is K, R or H for basic amino acids
  MISC_FEATURE (20)..(20): X is A and G
  MISC_FEATURE (21)..(21): X is A and G
  MISC_FEATURE (22)..(22): X is I, L or V
  MISC_FEATURE (23)..(23): X is I, L or V
  MISC_FEATURE (24)..(24): X is C or S
  MISC_FEATURE (25)..(25): X is T or S
  MISC_FEATURE (26)..(26): X is A or G
  MISC_FEATURE (27)..(27): X is I, L or V
  MISC_FEATURE (28)..(28): X is I, L or V
XXXXXXXXXXXXXXXXXXXXXXXXXXXX

SEQ ID NO: 275 - protein, 28 aa, Artificial
  Completely synthesized peptide construct
DRSTKVIDFHGGGDGQEEKAGVVSTGLI

SEQ ID NO: 276 - protein, 28 aa, Artificial
  peptide construct
  MISC_FEATURE (1)..(1): X is D and E for acidic amino acids
  MISC_FEATURE (2)..(2): X is K, R or H for basic amino acids
  MISC_FEATURE (3)..(3): X is C or S
  MISC_FEATURE (4)..(4): X is T or S
  MISC_FEATURE (5)..(5): X is K, R or H for basic amino acids
  MISC_FEATURE (6)..(6): X is I, L or V
  MISC_FEATURE (7)..(7): X is I, L or V
  MISC_FEATURE (8)..(8): X is D and E for acidic amino acids
  MISC_FEATURE (9)..(9): X is F, W  or Y for aromatic amino acids
  MISC_FEATURE (10)..(10): X is K, R or H for basic amino acids
  MISC_FEATURE (11)..(11): X is A and G
  MISC_FEATURE (12)..(12): X is  A or G
  MISC_FEATURE (13)..(13): X is A and G
  MISC_FEATURE (14)..(14): X is D and E for acidic amino acids
  MISC_FEATURE (15)..(15): X is A and G
  MISC_FEATURE (16)..(16): X is N or Q for amidated amino acids
  MISC_FEATURE (17)..(17): X is D and E for acidic amino acids
  MISC_FEATURE (18)..(18): X is D and E for acidic amino acids
  MISC_FEATURE (19)..(19): X is K, R or H for basic amino acids
  MISC_FEATURE (20)..(20): X is A and G
  MISC_FEATURE (21)..(21): X is A and G
  MISC_FEATURE (22)..(22): X is I, L or V
  MISC_FEATURE (23)..(23): X is I, L or V
  MISC_FEATURE (24)..(24): X is C or S
  MISC_FEATURE (25)..(25): X is T or S
  MISC_FEATURE (26)..(26): X is A or G
  MISC_FEATURE (27)..(27): X is I, L or V
  MISC_FEATURE (28)..(28): X is I, L or V
XXXXXXXXXXXXXXXXXXXXXXXXXXXX

SEQ ID NO: 277 - protein, 31 aa, Artificial
  Completely synthesized peptide construct
IAGFKGEQGPKGEGGGDGQEEKAGVVSTGLI

SEQ ID NO: 278 - protein, 31 aa, Artificial; identical to SEQ ID NO: 130
  peptide construct
  MISC_FEATURE (1)..(1): X is I, L or V
  MISC_FEATURE (2)..(2): X is A or G
  MISC_FEATURE (3)..(3): X is A or G
  MISC_FEATURE (4)..(4): X is F, W or Y for aromatic amino acids
  MISC_FEATURE (5)..(5): X is K, R or H for basic amino acids
  MISC_FEATURE (6)..(6): X is A or G
  MISC_FEATURE (7)..(7): X is D and E for acidic amino acids
  MISC_FEATURE (8)..(8): X is N or Q for amidated amino acids
  MISC_FEATURE (9)..(9): X is A or G
  MISC_FEATURE (10)..(10): X is F or P
  MISC_FEATURE (11)..(11): X is K, R or H for basic amino acids
  MISC_FEATURE (12)..(12): X is A or G
  MISC_FEATURE (13)..(13): X is D and E for acidic amino acids
  MISC_FEATURE (14)..(14): X is A and G
  MISC_FEATURE (15)..(15): X is A for G
  MISC_FEATURE (16)..(16): X is A and G
  MISC_FEATURE (17)..(17): X is D and E for acidic amino acids
  MISC_FEATURE (18)..(18): X is A and G
  MISC_FEATURE (19)..(19): X is N or Q for amidated amino acids
  MISC_FEATURE (20)..(20): X is D and E for acidic amino acids
  MISC_FEATURE (21)..(21): X is D and E for acidic amino acids
  MISC_FEATURE (22)..(22): X is K, R or H for basic amino acids
  MISC_FEATURE (23)..(23): X is A and G
  MISC_FEATURE (24)..(24): X is A and G
  MISC_FEATURE (25)..(25): X is I, L or V
  MISC_FEATURE (26)..(26): X is I, L or V
  MISC_FEATURE (27)..(27): X is C or S
  MISC_FEATURE (28)..(28): X is T or S
  MISC_FEATURE (29)..(29): X is A and G
  MISC_FEATURE (30)..(30): X is I, L or V
  MISC_FEATURE (31)..(31): X is I, L or V

SEQ ID NO: 279 - protein, 18 aa, Artificial
  Completely synthesized peptide construct
GGGDGQEEKAGVVSTGLI

SEQ ID NO: 280 - protein, 35 aa, Artificial; identical to SEQ ID NO: 206
  peptide construct
  MISC_FEATURE (1)..(1): X is T or S
  MISC_FEATURE (2)..(2): X is I, L or V
  MISC_FEATURE (3)..(3): X is K, R or H for basic amino acids
  MISC_FEATURE (4)..(4): X is I, L or V
  MISC_FEATURE (5)..(5): X is T or S
  MISC_FEATURE (6)..(6): X is I, L or V
  MISC_FEATURE (7)..(7): X is A and G
  MISC_FEATURE (8)..(8): X is I, L or V
  MISC_FEATURE (9)..(9): X is K, R or H for basic amino acids
  MISC_FEATURE (10)..(10): X is N or Q for amidated amino acids
  MISC_FEATURE (11)..(11): X is K, R or H for basic amino acids
  MISC_FEATURE (12)..(12): X is A and G
  MISC_FEATURE (13)..(13): X is D and E for acidic amino acids
  MISC_FEATURE (14)..(14): X is F or P
  MISC_FEATURE (15)..(15): X is K, R or H for basic amino acids
  MISC_FEATURE (16)..(16): X is N or Q for amidated amino acids
  MISC_FEATURE (17)..(17): X is T or S
  MISC_FEATURE (18)..(18): X is A and G
  MISC_FEATURE (19)..(19): X is A and G
  MISC_FEATURE (20)..(20): X is A and G
  MISC_FEATURE (21)..(21): X is D and E for acidic amino acids
  MISC_FEATURE (22)..(22): X is A and G
  MISC_FEATURE (23)..(23): X is N or Q for amidated amino acids
  MISC_FEATURE (24)..(24): X is D and E for acidic amino acids
  MISC_FEATURE (25)..(25): X is D and E for acidic amino acids
  MISC_FEATURE (26)..(26): X is K, R or H for basic amino acids
  MISC_FEATURE (27)..(27): X is A and G
  MISC_FEATURE (28)..(28): X is A and G
  MISC_FEATURE (29)..(29): X is I, L or V
  MISC_FEATURE (30)..(30): X is I, L or V
  MISC_FEATURE (31)..(31): X is C or S
  MISC_FEATURE (32)..(32): X is T or S
  MISC_FEATURE (33)..(33): X is A and G
  MISC_FEATURE (34)..(34): X is I, L or V
  MISC_FEATURE (35)..(35): X is I, L or V

SEQ ID NO: 281 - protein, 26 aa, Artificial
  Completely synthesized peptide construct
KNIVTPRTGGGDGQEEKAGVVSTGLI

SEQ ID NO: 282 - protein, 26 aa, Artificial
  peptide construct
  MISC_FEATURE (1)..(1): X is K, R or H for basic amino acids
  MISC_FEATURE (2)..(2): X is N or Q for amidated amino acids
  MISC_FEATURE (3)..(3): X is I, L or V
  MISC_FEATURE (4)..(4): X is I, L or V
  MISC_FEATURE (5)..(5): X is T or S
  MISC_FEATURE (6)..(6): X is F or  P
  MISC_FEATURE (7)..(7): X is K, R or H for basic amino acids
  MISC_FEATURE (8)..(8): X is T or S
  MISC_FEATURE (9)..(9): X is A and G
  MISC_FEATURE (10)..(10): X is A or G
  MISC_FEATURE (11)..(11): X is A and G
  MISC_FEATURE (12)..(12): X is D and E for acidic amino acids
  MISC_FEATURE (13)..(13): X is A and G
  MISC_FEATURE (14)..(14): X is N or Q for amidated amino acids
  MISC_FEATURE (15)..(15): X is D and E for acidic amino acids
  MISC_FEATURE (16)..(16): X is D and E for acidic amino acids
  MISC_FEATURE (17)..(17): X is K, R or H for basic amino acids
  MISC_FEATURE (18)..(18): X is A and G
  MISC_FEATURE (19)..(19): X is A and G
  MISC_FEATURE (20)..(20): X is I, L or V
  MISC_FEATURE (21)..(21): X is I, L or V
  MISC_FEATURE (22)..(22): X is C or S
  MISC_FEATURE (23)..(23): X is T or S
  MISC_FEATURE (24)..(24): X is A and G
  MISC_FEATURE (25)..(25): X is I, L or V
  MISC_FEATURE (26)..(26): X is I, L or V
XXXXXXXXXXXXXXXXXXXXXXXXXX

SEQ ID NO: 283 - protein, 33 aa, Artificial
  Completely synthesized peptide construct
GDKVSFFCKNKEKKCGGGDGQEEKAGVVSTGLI

SEQ ID NO: 284 - protein, 33 aa, Artificial; identical to SEQ ID NO: 99
  peptide construct
  MISC_FEATURE (1)..(1): X is A or G
  MISC_FEATURE (2)..(2): X is D and E for acidic amino acids
  MISC_FEATURE (3)..(3): X is K, R or H for basic amino acids
  MISC_FEATURE (4)..(4): X is I, L or V
  MISC_FEATURE (5)..(5): X is C or S
  MISC_FEATURE (6)..(6): X is F, W or Y for aromatic amino acids
  MISC_FEATURE (7)..(7): X is F, W or Y for aromatic amino acids
  MISC_FEATURE (8)..(8): X is C or S
  MISC_FEATURE (9)..(9): X is K, R or H for basic amino acids
  MISC_FEATURE (10)..(10): X is N or Q for amidated amino acids
  MISC_FEATURE (11)..(11): X is K, R or H for basic amino acids
  MISC_FEATURE (12)..(12): X is D and E for acidic amino acids
  MISC_FEATURE (13)..(13): X is K, R or H for basic amino acids
  MISC_FEATURE (14)..(14): X is K, R or H for basic amino acids
  MISC_FEATURE (15)..(15): X is C or S
  MISC_FEATURE (16)..(16): X is A and G
  MISC_FEATURE (17)..(17): X is A or G
  MISC_FEATURE (18)..(18): X is A and G
  MISC_FEATURE (19)..(19): X is D and E for acidic amino acids
  MISC_FEATURE (20)..(20): X is A and G
  MISC_FEATURE (21)..(21): X is N or Q for amidated amino acids
  MISC_FEATURE (22)..(22): X is D and E for acidic amino acids
  MISC_FEATURE (23)..(23): X is D and E for acidic amino acids
  MISC_FEATURE (24)..(24): X is K, R or H for basic amino acids
  MISC_FEATURE (25)..(25): X is A and G
  MISC_FEATURE (26)..(26): X is A and G
  MISC_FEATURE (27)..(27): X is I, L or V
  MISC_FEATURE (28)..(28): X is I, L or V
  MISC_FEATURE (29)..(29): X is C or S
  MISC_FEATURE (30)..(30): X is T or S
  MISC_FEATURE (31)..(31): X is A and G
  MISC_FEATURE (32)..(32): X is I, L or V
  MISC_FEATURE (33)..(33): X is I, L or V

SEQ ID NO: 285 - protein, 35 aa, Artificial
  Completely synthesized peptide construct
EIIVTHFPFDEQNCSMKGGGDGQEEKAGVVSTGLI

SEQ ID NO: 286 - protein, 35 aa, Artificial; identical to SEQ ID NO: 206
  peptide construct
  MISC_FEATURE (1)..(1): X is D and E for acidic amino acids
  MISC_FEATURE (2)..(2): X is I, L or V
  MISC_FEATURE (3)..(3): X is I, L or V
  MISC_FEATURE (4)..(4): X is I, L or V
  MISC_FEATURE (5)..(5): X is T or S
  MISC_FEATURE (6)..(6): X is K, R or H for basic amino acids
  MISC_FEATURE (7)..(7): X is F, W or Y for aromatic amino acids
  MISC_FEATURE (8)..(8): X is F or P
  MISC_FEATURE (9)..(9): X is F, W or Y for aromatic amino acids
  MISC_FEATURE (10)..(10): X is D and E for acidic amino acids
  MISC_FEATURE (11)..(11): X is D and E for acidic amino acids
  MISC_FEATURE (12)..(12): X is N or Q for amidated amino acids
  MISC_FEATURE (13)..(13): X is N or Q for amidated amino acids
  MISC_FEATURE (14)..(14): X is C or S
  MISC_FEATURE (15)..(15): X is C or S
  MISC_FEATURE (16)..(16): X is M or Nle
  MISC_FEATURE (17)..(17): X is K, R or H for basic amino acids
  MISC_FEATURE (18)..(18): X is A and G
  MISC_FEATURE (19)..(19): X is A or G
  MISC_FEATURE (20)..(20): X is A and G
  MISC_FEATURE (21)..(21): X is D and E for acidic amino acids
  MISC_FEATURE (22)..(22): X is A and G
  MISC_FEATURE (23)..(23): X is N or Q for amidated amino acids
  MISC_FEATURE (24)..(24): X is  D and E for acidic amino acids
  MISC_FEATURE (25)..(25): X is D and E for acidic amino acids
  MISC_FEATURE (26)..(26): X is K, R or H for basic amino acids
  MISC_FEATURE (27)..(27): X is A and G
  MISC_FEATURE (28)..(28): X is A and G
  MISC_FEATURE (29)..(29): X is I, L or V
  MISC_FEATURE (30)..(30): X is I, L or V
  MISC_FEATURE (31)..(31): X is C or S
  MISC_FEATURE (32)..(32): X is T or S
  MISC_FEATURE (33)..(33): X is A or G
  MISC_FEATURE (34)..(34): X is I, L or V
  MISC_FEATURE (35)..(35): X is I, L or V

SEQ ID NO: 287 - protein, 31 aa, Artificial
  Completely synthesized peptide construct
VHFFKNIVTPRTPGGGDGQEEKAGVVSTGLI

SEQ ID NO: 288 - protein, 31 aa, Artificial; identical to SEQ ID NO: 130
  peptide construct
  MISC_FEATURE (1)..(1): X is I, L or V
  MISC_FEATURE (2)..(2): X is K, R or H for basic amino acids
  MISC_FEATURE (3)..(3): X is F, W or Y for aromatic amino acids
  MISC_FEATURE (4)..(4): X is F, W or Y for aromatic amino acids
  MISC_FEATURE (5)..(5): X is K, R or H for basic amino acids
  MISC_FEATURE (6)..(6): X is N or Q for amidated amino acids
  MISC_FEATURE (7)..(7): X is I, L or V
  MISC_FEATURE (8)..(8): X is I, L or V
  MISC_FEATURE (9)..(9): X is T or S
  MISC_FEATURE (10)..(10): X is F or P
  MISC_FEATURE (11)..(11): X is K, R or H for basic amino acids
  MISC_FEATURE (12)..(12): X is T or S
  MISC_FEATURE (13)..(13): X is F or P
  MISC_FEATURE (14)..(14): X is A and G
  MISC_FEATURE (15)..(15): X is A or G
  MISC_FEATURE (16)..(16): X is A and G
  MISC_FEATURE (17)..(17): X is D and E for acidic amino acids
  MISC_FEATURE (18)..(18): X is A and G
  MISC_FEATURE (19)..(19): X is N or Q for amidated amino acids
  MISC_FEATURE (20)..(20): X is D and E for acidic amino acids
  MISC_FEATURE (21)..(21): X is D and E for acidic amino acids
  MISC_FEATURE (22)..(22): X is K, R or H for basic amino acids
  MISC_FEATURE (23)..(23): X is A and G
  MISC_FEATURE (24)..(24): X is A and G
  MISC_FEATURE (25)..(25): X is I, L or V
  MISC_FEATURE (26)..(26): X is I, L or V
  MISC_FEATURE (27)..(27): X is C or S
  MISC_FEATURE (28)..(28): X is T or S
  MISC_FEATURE (29)..(29): X is A and G
  MISC_FEATURE (30)..(30): X is I, L or V
  MISC_FEATURE (31)..(31): X is I, L or V

SEQ ID NO: 289 - protein, 36 aa, Artificial
  Completely synthesized peptide construct
YQQLNSERVGVPNENIENGGGDGQEEKAGVVSTGLI

SEQ ID NO: 290 - protein, 35 aa, Artificial; identical to SEQ ID NO: 206
  peptide construct
  MISC_FEATURE (1)..(1): X is F, W or Y for aromatic amino acids
  MISC_FEATURE (2)..(2): X is N or Q for amidated amino acids
  MISC_FEATURE (3)..(3): X is N or Q for amidated amino acids
  MISC_FEATURE (4)..(4): X is I, L or V
  MISC_FEATURE (5)..(5): X is N or Q for amidated amino acids
  MISC_FEATURE (6)..(6): X is C or S
  MISC_FEATURE (7)..(7): X is D and E for acidic amino acids
  MISC_FEATURE (8)..(8): X is K, R or H for basic amino acids
  MISC_FEATURE (9)..(9): X is A or G
  MISC_FEATURE (10)..(10): X is I, L or V
  MISC_FEATURE (11)..(11): X is F or P
  MISC_FEATURE (12)..(12): X is N or Q for amidated amino acids
  MISC_FEATURE (13)..(13): X is D and E for acidic amino acids
  MISC_FEATURE (14)..(14): X is N or Q for amidated amino acids
  MISC_FEATURE (15)..(15): X is I, L or V
  MISC_FEATURE (16)..(16): X is D and E for acidic amino acids
  MISC_FEATURE (17)..(17): X is N or Q for amidated amino acids
  MISC_FEATURE (18)..(18): X is A and G
  MISC_FEATURE (19)..(19): X is A or G
  MISC_FEATURE (20)..(20): X is  A and G
  MISC_FEATURE (21)..(21): X is D and E for acidic amino acids
  MISC_FEATURE (22)..(22): X is A and G
  MISC_FEATURE (23)..(23): X is N or Q for amidated amino acids
  MISC_FEATURE (24)..(24): X is D and E for acidic amino acids
  MISC_FEATURE (25)..(25): X is D and E for acidic amino acids
  MISC_FEATURE (26)..(26): X is K, R or H for basic amino acids
  MISC_FEATURE (27)..(27): X is A and G
  MISC_FEATURE (28)..(28): X is A and G
  MISC_FEATURE (29)..(29): X is I, L or V
  MISC_FEATURE (30)..(30): X is I, L or V
  MISC_FEATURE (31)..(31): X is C or S
  MISC_FEATURE (32)..(32): X is T or S
  MISC_FEATURE (33)..(33): X is A or G
  MISC_FEATURE (34)..(34): X is I, L or V
  MISC_FEATURE (35)..(35): X is I, L or V

SEQ ID NO: 291 - protein, 31 aa, Artificial
  Completely synthesized peptide construct
VFIKRVSNVIIHGGGGDGQEEKAGVVSTGLI

SEQ ID NO: 292 - protein, 31 aa, Artificial; identical to SEQ ID NO: 130
  peptide construct
  MISC_FEATURE (1)..(1): X is I, L or V
  MISC_FEATURE (2)..(2): X is F, W or Y for aromatic amino acids
  MISC_FEATURE (3)..(3): X is I, L or V
  MISC_FEATURE (4)..(4): X is K,  R or H for basic amino acids
  MISC_FEATURE (5)..(5): X is K, R or H for basic amino acids
  MISC_FEATURE (6)..(6): X is I, L or V
  MISC_FEATURE (7)..(7): X is C or S
  MISC_FEATURE (8)..(8): X is N or Q for amidated amino acids
  MISC_FEATURE (9)..(9): X is I, L or V
  MISC_FEATURE (10)..(10): X is I, L or V
  MISC_FEATURE (11)..(11): X is I, L or V
  MISC_FEATURE (12)..(12): X is K, R or H for basic amino acids
  MISC_FEATURE (13)..(13): X is A or G
  MISC_FEATURE (14)..(14): X is A and G
  MISC_FEATURE (15)..(15): X is A or G
  MISC_FEATURE (16)..(16): X is A and G
  MISC_FEATURE (17)..(17): X is D and E for acidic amino acids
  MISC_FEATURE (18)..(18): X is A and G
  MISC_FEATURE (19)..(19): X is N or Q for amidated amino acids
  MISC_FEATURE (20)..(20): X is D and E for acidic amino acids
  MISC_FEATURE (21)..(21): X is D and E for acidic amino acids
  MISC_FEATURE (22)..(22): X is K, R or H for basic amino acids
  MISC_FEATURE (23)..(23): X is A and G
  MISC_FEATURE (24)..(24): X is A and G
  MISC_FEATURE (25)..(25): X is I, L or V
  MISC_FEATURE (26)..(26): X is I, L or V
  MISC_FEATURE (27)..(27): X is C or S
  MISC_FEATURE (28)..(28): X is T or S
  MISC_FEATURE (29)..(29): X is A or G
  MISC_FEATURE (30)..(30): X is I, L or V
  MISC_FEATURE (31)..(31): X is I, L or V

SEQ ID NO: 293 - protein, 33 aa, Artificial
  Completely synthesized peptide construct
MKVTVAFNQFGPNRRGGGDGQEEKAGVVSTGLI

SEQ ID NO: 294 - protein, 33 aa, Artificial; identical to SEQ ID NO: 99
  peptide construct
  MISC_FEATURE (1)..(1): X is M or Nle
  MISC_FEATURE (2)..(2): X is K, R or H for basic amino acids
  MISC_FEATURE (3)..(3): X is I, L or V
  MISC_FEATURE (4)..(4): X is Tor S
  MISC_FEATURE (5)..(5): X is I, L or V
  MISC_FEATURE (6)..(6): X is A or G
  MISC_FEATURE (7)..(7): X is F, W or Y for amidated amino acids
  MISC_FEATURE (8)..(8): X is N or Q for amidated amion acids
  MISC_FEATURE (9)..(9): X is N or Q for amidated amino acids
  MISC_FEATURE (10)..(10): X is F, W or Y for aromatic amino acids
  MISC_FEATURE (11)..(11): X is A or G
  MISC_FEATURE (12)..(12): X is F or P
  MISC_FEATURE (13)..(13): X is N or Q for amidated amino acids
  MISC_FEATURE (14)..(14): X is K, R or H for basic amino acids
  MISC_FEATURE (15)..(15): X is K, R or H for basic amino acids
  MISC_FEATURE (16)..(16): X is A and G
  MISC_FEATURE (17)..(17): X is A or G
  MISC_FEATURE (18)..(18): X is A and G
  MISC_FEATURE (19)..(19): X is D and E for acidic amino acids
  MISC_FEATURE (20)..(20): X is A and G
  MISC_FEATURE (21)..(21): X is N or Q for amidated amino acids
  MISC_FEATURE (22)..(22): X is D and E for acidic amino acids
  MISC_FEATURE (23)..(23): X is D and E for acidic amino acids
  MISC_FEATURE (24)..(24): X is K, R or H for basic amino acids
  MISC_FEATURE (25)..(25): X is A and G
  MISC_FEATURE (26)..(26): X is A and G
  MISC_FEATURE (27)..(27): X is  I, L or V
  MISC_FEATURE (28)..(28): X is I, L or V
  MISC_FEATURE (29)..(29): X is C or S
  MISC_FEATURE (30)..(30): X is T or S
  MISC_FEATURE (31)..(31): X is A or G
  MISC_FEATURE (32)..(32): X is I, L or V
  MISC_FEATURE (33)..(33): X is I, L or V

SEQ ID NO: 295 - protein, 33 aa, Artificial
  Completely synthesized peptide construct
IASRRVDGIIAAYQNGGGDGQEEKAGVVSTGLI

SEQ ID NO: 296 - protein, 33 aa, Artificial; identical to SEQ ID NO: 99
  peptide construct
  MISC_FEATURE (1)..(1): X is I, L or V
  MISC_FEATURE (2)..(2): X is A or G
  MISC_FEATURE (3)..(3): X is C or S
  MISC_FEATURE (4)..(4): X is K, R or H for basic amino acids
  MISC_FEATURE (5)..(5): X is K, R or H for basic amino acids
  MISC_FEATURE (6)..(6): X is I, L or V
  MISC_FEATURE (7)..(7): X is D and E for acidic amino acids
  MISC_FEATURE (8)..(8): X is A or G
  MISC_FEATURE (9)..(9): X is I, L or V
  MISC_FEATURE (10)..(10): X is I, L or V
  MISC_FEATURE (11)..(11): X is A or G
  MISC_FEATURE (12)..(12): X is A or G
  MISC_FEATURE (13)..(13): X is F, W or Y for aromatic amino acids
  MISC_FEATURE (14)..(14): X is N or Q for amidated amino acids
  MISC_FEATURE (15)..(15): X is N or Q for amidated amino acids
  MISC_FEATURE (16)..(16): X is A and G
  MISC_FEATURE (17)..(17): X is A or G
  MISC_FEATURE (18)..(18): X is A and G
  MISC_FEATURE (19)..(19): X is D and E for acidic amino acids
  MISC_FEATURE (20)..(20): X is A and G
  MISC_FEATURE (21)..(21): X is N or Q for amidated amino acids
  MISC_FEATURE (22)..(22): X is D and E for acidic amino acids
  MISC_FEATURE (23)..(23): X is D and E for acidic amino acids
  MISC_FEATURE (24)..(24): X is K, R or H for basic amino acids
  MISC_FEATURE (25)..(25): X is A and G
  MISC_FEATURE (26)..(26): X is A and G
  MISC_FEATURE (27)..(27): X is I, L or V
  MISC_FEATURE (28)..(28): X is I, L or V
  MISC_FEATURE (29)..(29): X is C or S
  MISC_FEATURE (30)..(30): X is T or S
  MISC_FEATURE (31)..(31): X is A or G
  MISC_FEATURE (32)..(32): X is I, L or V
  MISC_FEATURE (33)..(33): X is I, L or V

SEQ ID NO: 297 - protein, 37 aa, Artificial
  Completely synthesized peptide construct
IDIFASKNFHLQKNTIGTGGGGDGQEEKAGVVSTGLI

SEQ ID NO: 298 - protein, 37 aa, Artificial; identical to SEQ ID NO: 158
  peptide construct
  MISC_FEATURE (1)..(1): X is I, L or V
  MISC_FEATURE (2)..(2): X is D and E for acidic amino acids
  MISC_FEATURE (3)..(3): X is I, L or V
  MISC_FEATURE (4)..(4): X is F, W or  Y for aromatic amino acids
  MISC_FEATURE (5)..(5): X is A or G
  MISC_FEATURE (6)..(6): X is C or S
  MISC_FEATURE (7)..(7): X is K, R or H for basic amino acids
  MISC_FEATURE (8)..(8): X is N or Q for amidated amino acids
  MISC_FEATURE (9)..(9): X is F, W or Y for aromatic amino acids
  MISC_FEATURE (10)..(10): X is K, R or H for basic amino acids
  MISC_FEATURE (11)..(11): X is I, L or V
  MISC_FEATURE (12)..(12): X is N or Q for amidated amino acids
  MISC_FEATURE (13)..(13): X is K, R or H for basic amino acids
  MISC_FEATURE (14)..(14): X is N or Q for amidated amino acids
  MISC_FEATURE (15)..(15): X is T or S
  MISC_FEATURE (16)..(16): X is I, L or V
  MISC_FEATURE (17)..(17): X is A or G
  MISC_FEATURE (18)..(18): X is T or S
  MISC_FEATURE (19)..(19): X is A or G
  MISC_FEATURE (20)..(20): X is A and G
  MISC_FEATURE (21)..(21): X is A or G
  MISC_FEATURE (22)..(22): X is A and G
  MISC_FEATURE (23)..(23): X is D and E for acidic amino acids
  MISC_FEATURE (24)..(24): X is A and G
  MISC_FEATURE (25)..(25): X is N or Q for amidated amino acids
  MISC_FEATURE (26)..(26): X is D and E for acidic amino acids
  MISC_FEATURE (27)..(27): X is D and E for acidic amino acids
  MISC_FEATURE (28)..(28): X is K, R or H for basic amino acids
  MISC_FEATURE (29)..(29): X is A and G
  MISC_FEATURE (30)..(30): X is A and G
  MISC_FEATURE (31)..(31): X is I, L or V
  MISC_FEATURE (32)..(32): X is I, L or V
  MISC_FEATURE (33)..(33): X is C or S
  MISC_FEATURE (34)..(34): X is T or S
  MISC_FEATURE (35)..(35): X is A or G
  MISC_FEATURE (36)..(36): X is I, L or V
  MISC_FEATURE (37)..(37): X is I, L or V

SEQ ID NO: 299 - protein, 43 aa, Artificial
  Completely synthesized peptide construct
GIGAVLKVLTTGPALISWIKRKRQQGGGDGQEEKAGVVSTGLI

SEQ ID NO: 300 - protein, 43 aa, Artificial; identical to SEQ ID NO: 220
  peptide construct
  MISC_FEATURE (1)..(1): X is D and E for acidic amino acids
  MISC_FEATURE (2)..(2): X is I, L or V
  MISC_FEATURE (3)..(3): X is A or G
  MISC_FEATURE (4)..(4): X is A or G
  MISC_FEATURE (5)..(5): X is I, L or V
  MISC_FEATURE (6)..(6): X is I, L or V
  MISC_FEATURE (7)..(7): X is K, R or H for basic amino acids
  MISC_FEATURE (8)..(8): X is I, L or V
  MISC_FEATURE (9)..(9): X is I, L or V
  MISC_FEATURE (10)..(10): X is T or S
  MISC_FEATURE (11)..(11): X is T or S
  MISC_FEATURE (12)..(12): X is A or G
  MISC_FEATURE (13)..(13): X is F or P
  MISC_FEATURE (14)..(14): X is A or G
  MISC_FEATURE (15)..(15): X is I, L or V
  MISC_FEATURE (16)..(16): X is I, L or V
  MISC_FEATURE (17)..(17): X is C or S
  MISC_FEATURE (18)..(18): X is F, W or  Y for aromatic amino acids
  MISC_FEATURE (19)..(19): X is I, L or V
  MISC_FEATURE (20)..(20): X is K, R or H for basic amino acids
  MISC_FEATURE (21)..(21): X is K, R or H for basic amino acids
  MISC_FEATURE (22)..(22): X is K, R or H for basic amino acids
  MISC_FEATURE (23)..(23): X is K, R or H for basic amino acids
  MISC_FEATURE (24)..(24): X is N or Q for amidated amino acids
  MISC_FEATURE (25)..(25): X is N or Q for amidated amino acids
  MISC_FEATURE (26)..(26): X is A and G
  MISC_FEATURE (27)..(27): X is A or G
  MISC_FEATURE (28)..(28): X is A and G
  MISC_FEATURE (29)..(29): X is D and E for acidici amino acids
  MISC_FEATURE (30)..(30): X is A and G
  MISC_FEATURE (31)..(31): X is N or Q for amidated amino acids
  MISC_FEATURE (32)..(32): X is D and E for acidic amino acids
  MISC_FEATURE (33)..(33): X is D and E for acidic amino acids
  MISC_FEATURE (34)..(34): X is K, R or H for basic amino acids
  MISC_FEATURE (35)..(35): X is A and G
  MISC_FEATURE (36)..(36): X is A and G
  MISC_FEATURE (37)..(37): X is  I, L or V
  MISC_FEATURE (38)..(38): X is I, L or V
  MISC_FEATURE (39)..(39): X is C or S
  MISC_FEATURE (40)..(40): X is T or S
  MISC_FEATURE (41)..(41): X is A or G
  MISC_FEATURE (42)..(42): X is I, L or V
  MISC_FEATURE (43)..(43): X is I, L or V

SEQ ID NO: 301 - protein, 56 aa, Artificial
  Completely synthesized peptide construct
DLLKNGERIEKVEGGGDAEFRHDSGYEVHHQKLVFFAEDVGSNKGAIIGLMVGGVV

SEQ ID NO: 302 - protein, 56 aa, Artificial
  peptide construct
  MISC_FEATURE (1)..(1): X is D and E for acidic amino acids
  MISC_FEATURE (2)..(2): X is I, L or V
  MISC_FEATURE (3)..(3): X is I, L or V
  MISC_FEATURE (4)..(4): X is K, R or H for basic amino acids
  MISC_FEATURE (5)..(5): X is N or Q for amidated amino acids
  MISC_FEATURE (6)..(6): X is A or G
  MISC_FEATURE (7)..(7): X is D and E for acidic amino acids
  MISC_FEATURE (8)..(8): X is K, R or H for basic amino acids
  MISC_FEATURE (9)..(9): X is I, L or V
  MISC_FEATURE (10)..(10): X is D and E for acidic amino acids
  MISC_FEATURE (11)..(11): X is K, R or H for basic amino acids
  MISC_FEATURE (12)..(12): X is I, L or V
  MISC_FEATURE (13)..(13): X is D and E for acidic amino acids
  MISC_FEATURE (14)..(14): X is A or G
  MISC_FEATURE (15)..(15): X is A or G
  MISC_FEATURE (16)..(16): X is A or G
  MISC_FEATURE (17)..(17): X is D and E for acidic amino acids
  MISC_FEATURE (18)..(18): X is A or G
  MISC_FEATURE (19)..(19): X is D and E for acidic amino acids
  MISC_FEATURE (20)..(20): X is F, W or Y for aromatic amino acids
  MISC_FEATURE (21)..(21): X is K, R or H for basic amino acids
  MISC_FEATURE (22)..(22): X is K, R or H for basic amino acids
  MISC_FEATURE (23)..(23): X is D and E for acidic amino acids
  MISC_FEATURE (24)..(24): X is T or S
  MISC_FEATURE (25)..(25): X is A or G
  MISC_FEATURE (26)..(26): X is F, W or Y for aromatic amino acids
  MISC_FEATURE (27)..(27): X is D and E for acidic amino acids
  MISC_FEATURE (28)..(28): X is I, L or V
  MISC_FEATURE (29)..(29): X is K, R or H for basic amino acids
  MISC_FEATURE (30)..(30): X is K, R or H for basic amino acids
  MISC_FEATURE (31)..(31): X is N or Q for amidated amino acids
  MISC_FEATURE (32)..(32): X is K, R or H for basic amino acids
  MISC_FEATURE (33)..(33): X is I, L or V
  MISC_FEATURE (34)..(34): X is I, L or V
  MISC_FEATURE (35)..(35): X is F, W or Y for aromatic amino acids
  MISC_FEATURE (36)..(36): X is F, W or Y for aromatic amino acids
  MISC_FEATURE (37)..(37): X is A or G
  MISC_FEATURE (38)..(38): X is D and E for acidic amino acids
  MISC_FEATURE (39)..(39): X is D and E for acidic amino acids
  MISC_FEATURE (40)..(40): X is I, L or V
  MISC_FEATURE (41)..(41): X is A or G
  MISC_FEATURE (42)..(42): X is C or S
  MISC_FEATURE (43)..(43): X is N or Q for amidated amino acids
  MISC_FEATURE (44)..(44): X is K, R or H for basic amino acids
  MISC_FEATURE (45)..(45): X is A or G
  MISC_FEATURE (46)..(46): X is A or G
  MISC_FEATURE (47)..(47): X is I, L or V
  MISC_FEATURE (48)..(48): X is I, L or V
  MISC_FEATURE (49)..(49): X is A or G
  MISC_FEATURE (50)..(50): X is I, L or V
  MISC_FEATURE (51)..(51): X is M or Nle
  MISC_FEATURE (52)..(52): X is I, L or V
  MISC_FEATURE (53)..(53): X is A or G
  MISC_FEATURE (54)..(54): X is A or G
  MISC_FEATURE (55)..(55): X is I, L or V
  MISC_FEATURE (56)..(56): X is I, L or V
XXXXXXXXXXXXXXXXXXXXXXXXXXXXXXXXXXXXXXXXXXXXXXXXXXXXXXXX

SEQ ID NO: 303 - protein, 44 aa, Artificial
  Completely synthesized peptide construct
DLLKNGERIEKVEGGGDAEFRHDSGYEVHHQKLVFFAENVGSNK

SEQ ID NO: 304 - protein, 44 aa, Artificial
  peptide construct
  MISC_FEATURE (1)..(1): X is D and E for acidic amino acids
  MISC_FEATURE (2)..(2): X is I, L or V
  MISC_FEATURE (3)..(3): X is I, L or V
  MISC_FEATURE (4)..(4): X is K, R or H for basic amino acids
  MISC_FEATURE (5)..(5): X is N or Q for amidated amino acids
  MISC_FEATURE (6)..(6): X is A or G
  MISC_FEATURE (7)..(7): X is D and E for acidic amino acids
  MISC_FEATURE (8)..(8): X is K, R or H for basic amino acids
  MISC_FEATURE (9)..(9): X is I, L or V
  MISC_FEATURE (10)..(10): X is D and E for acidic amino acids
  MISC_FEATURE (11)..(11): X is K, R or H for basic amino acids
  MISC_FEATURE (12)..(12): X is I, L or V
  MISC_FEATURE (13)..(13): X is D and E for acidic amino acids
  MISC_FEATURE (14)..(14): X is A or G
  MISC_FEATURE (15)..(15): X is A or G
  MISC_FEATURE (16)..(16): X is A or G
  MISC_FEATURE (17)..(17): X is D and E for acidic amino acids
  MISC_FEATURE (18)..(18): X is A or G
  MISC_FEATURE (19)..(19): X is D and E for acidic amino acids
  MISC_FEATURE (20)..(20): X is F, W or Y for aromatic amino acids
  MISC_FEATURE (21)..(21): X is K, R or H for basic amino acids
  MISC_FEATURE (22)..(22): X is K, R or H for basic amino acids
  MISC_FEATURE (23)..(23): X is D and E for acidic amino acids
  MISC_FEATURE (24)..(24): X is T or S
  MISC_FEATURE (25)..(25): X is A or G
  MISC_FEATURE (26)..(26): X is F, W or Y for aromatic amino acids
  MISC_FEATURE (27)..(27): X is D and E for acidic amino acids
  MISC_FEATURE (28)..(28): X is I, L or V
  MISC_FEATURE (29)..(29): X is K, R or H for basic amino acids
  MISC_FEATURE (30)..(30): X is K, R or H for basic amino acids
  MISC_FEATURE (31)..(31): X is N or Q for amidated amino acids
  MISC_FEATURE (32)..(32): X is K, R or H for basic amino acids
  MISC_FEATURE (33)..(33): X is I, L or V
  MISC_FEATURE (34)..(34): X is I, L or V
  MISC_FEATURE (35)..(35): X is F, W or Y for aromatic amino acids
  MISC_FEATURE (36)..(36): X is F, W or Y for aromatic amino acids
  MISC_FEATURE (37)..(37): X is A or G
  MISC_FEATURE (38)..(38): X is D and E for acidic amino acids
  MISC_FEATURE (39)..(39): X is D and E for acidic amino acids
  MISC_FEATURE (40)..(40): X is I, L or V
  MISC_FEATURE (41)..(41): X is A or G
  MISC_FEATURE (42)..(42): X is C or S
  MISC_FEATURE (43)..(43): X is N or Q for amidated amino acids
  MISC_FEATURE (44)..(44): X is K, R or H for basic amino acids
XXXXXXXXXXXXXXXXXXXXXXXXXXXXXXXXXXXXXXXXXXXX

SEQ ID NO: 305 - protein, 45 aa, Artificial
  Completely synthesized peptide construct
DLKNGERIEKVEGGGDAEFRHDSGYEVHHQKLVFFAENVGSNKAI

SEQ ID NO: 306 - protein, 46 aa, Artificial; identical to SEQ ID NO: 144
  peptide construct
  MISC_FEATURE (1)..(1): X is D and E for acidic amino acids
  MISC_FEATURE (2)..(2): X is I, L or V
  MISC_FEATURE (3)..(3): X is I, L or V
  MISC_FEATURE (4)..(4): X is K, R or H for basic amino acids
  MISC_FEATURE (5)..(5): X is N or Q for amidated amino acids
  MISC_FEATURE (6)..(6): X is A or G
  MISC_FEATURE (7)..(7): X is D and E for acidic amino acids
  MISC_FEATURE (8)..(8): X is K, R or H for basic amino acids
  MISC_FEATURE (9)..(9): X is I, L or V
  MISC_FEATURE (10)..(10): X is D and E for acidic amino acids
  MISC_FEATURE (11)..(11): X is K, R or H for basic amino acids
  MISC_FEATURE (12)..(12): X is I, L or V
  MISC_FEATURE (13)..(13): X is D and E for acidic amino acids
  MISC_FEATURE (14)..(14): X is A or G
  MISC_FEATURE (15)..(15): X is A or G
  MISC_FEATURE (16)..(16): X is A or G
  MISC_FEATURE (17)..(17): X is D and E for acidic amino acids
  MISC_FEATURE (18)..(18): X is A or G
  MISC_FEATURE (19)..(19): X is D and E for acidic amino acids
  MISC_FEATURE (20)..(20): X is F, W or Y for aromatic amino acids
  MISC_FEATURE (21)..(21): X is K, R or H for basic amino acids
  MISC_FEATURE (22)..(22): X is K, R or H for basic amino acids
  MISC_FEATURE (23)..(23): X is D and E for acidic amino acids
  MISC_FEATURE (24)..(24): X is T or S
  MISC_FEATURE (25)..(25): X is A or G
  MISC_FEATURE (26)..(26): X is F, W or Y for aromatic amino acids
  MISC_FEATURE (27)..(27): X is D and E for acidic amino acids
  MISC_FEATURE (28)..(28): X is I, L or V
  MISC_FEATURE (29)..(29): X is K, R or H for basic amino acids
  MISC_FEATURE (30)..(30): X is K, R or H for basic amino acids
  MISC_FEATURE (31)..(31): X is N or Q for amidated amino acids
  MISC_FEATURE (32)..(32): X is K, R or H for basic amino acids
  MISC_FEATURE (33)..(33): X is I, L or V
  MISC_FEATURE (34)..(34): X is I, L or V
  MISC_FEATURE (35)..(35): X is F, W or Y for aromatic amino acids
  MISC_FEATURE (36)..(36): X is F, W or Y for aromatic amino acids
  MISC_FEATURE (37)..(37): X is A or G
  MISC_FEATURE (38)..(38): X is D and E for acidic amino acids
  MISC_FEATURE (39)..(39): X is D and E for acidic amino acids
  MISC_FEATURE (40)..(40): X is I, L or V
  MISC_FEATURE (41)..(41): X is A or G
  MISC_FEATURE (42)..(42): X is C or S
  MISC_FEATURE (43)..(43): X is N or Q for amidated amino acids
  MISC_FEATURE (44)..(44): X is K, R or H for basic amino acids
  MISC_FEATURE (45)..(45): X is A or G
  MISC_FEATURE (46)..(46): X is I, L or V

SEQ ID NO: 307 - protein, 27 aa, Artificial
  Completely synthesized peptide construct
DLLKNGERIEKVEGGGDAEFRHDSGYE

SEQ ID NO: 308 - protein, 27 aa, Artificial
  peptide construct
  MISC_FEATURE (1)..(1): X is D and E for acidic amino acids
  MISC_FEATURE (2)..(2): X is I, L or V
  MISC_FEATURE (3)..(3): X is I, L or V
  MISC_FEATURE (4)..(4): X is K, R or H for basic amino acids
  MISC_FEATURE (5)..(5): X is N or Q for amidated amino acids
  MISC_FEATURE (6)..(6): X is A or G
  MISC_FEATURE (7)..(7): X is D and E for acidic amino acids
  MISC_FEATURE (8)..(8): X is K, R or H for basic amino acids
  MISC_FEATURE (9)..(9): X is I, L or V
  MISC_FEATURE (10)..(10): X is D and E for acidic amino acids
  MISC_FEATURE (11)..(11): X is K, R or H for basic amino acids
  MISC_FEATURE (12)..(12): X is I, L or V
  MISC_FEATURE (13)..(13): X is D and E for acidic amino acids
  MISC_FEATURE (14)..(14): X is A or G
  MISC_FEATURE (15)..(15): X is A or G
  MISC_FEATURE (16)..(16): X is A or G
  MISC_FEATURE (17)..(17): X is D and E for acidic amino acids
  MISC_FEATURE (18)..(18): X is A or G
  MISC_FEATURE (19)..(19): X is D and E for acidic amino acids
  MISC_FEATURE (20)..(20): X is F, W or Y for aromatic amino acids
  MISC_FEATURE (21)..(21): X is K, R or H for basic amino acids
  MISC_FEATURE (22)..(22): X is K, R or H for basic amino acids
  MISC_FEATURE (23)..(23): X is D and E for acidic amino acids
  MISC_FEATURE (24)..(24): X is T or S
  MISC_FEATURE (25)..(25): X is A or G
  MISC_FEATURE (26)..(26): X is F, W or Y for aromatic amino acids
  MISC_FEATURE (27)..(27): X is D and E for acidic amino acids
XXXXXXXXXXXXXXXXXXXXXXXXXXX

SEQ ID NO: 309 - protein, 23 aa, Artificial
  Completely synthesized peptide construct
DLLKNGERIEKVEGGGENVGSNK

SEQ ID NO: 310 - protein, 23 aa, Artificial
  peptide construct
  MISC_FEATURE (1)..(1): X is D and E for acidic amino acids
  MISC_FEATURE (2)..(2): X is I, L or V
  MISC_FEATURE (3)..(3): X is I, L or V
  MISC_FEATURE (4)..(4): X is K, R or H for basic amino acids
  MISC_FEATURE (5)..(5): X is N or Q for amidated amino acids
  MISC_FEATURE (6)..(6): X is A or G
  MISC_FEATURE (7)..(7): X is D and E for acidic amino acids
  MISC_FEATURE (8)..(8): X is K, R or H for basic amino acids
  MISC_FEATURE (9)..(9): X is I, L or V
  MISC_FEATURE (10)..(10): X is D and E for acidic amino acids
  MISC_FEATURE (11)..(11): X is K, R or H for basic amino acids
  MISC_FEATURE (12)..(12): X is I, L or V
  MISC_FEATURE (13)..(13): X is D and E for acidic amino acids
  MISC_FEATURE (14)..(14): X is A or G
  MISC_FEATURE (15)..(15): X is A or G
  MISC_FEATURE (16)..(16): X is A or G
  MISC_FEATURE (17)..(17): X is D and E for acidic amino acids
  MISC_FEATURE (18)..(18): X is D and E for acidic amino acids
  MISC_FEATURE (19)..(19): X is I, L or V
  MISC_FEATURE (20)..(20): X is A or G
  MISC_FEATURE (21)..(21): X is C or S
  MISC_FEATURE (22)..(22): X is N or Q for amidated amino acids
  MISC_FEATURE (23)..(23): X is K, R or H for basic amino acids
XXXXXXXXXXXXXXXXXXXXXXX

SEQ ID NO: 311 - protein, 28 aa, Artificial
  Completely synthesized peptide construct
DLLKNGERIEKVEGGGDAEFRHDSGYEV

SEQ ID NO: 312 - protein, 28 aa, Artificial
  peptide construct
  MISC_FEATURE (1)..(1): X is D and E for acidic amino acids
  MISC_FEATURE (2)..(2): X is I, L or V
  MISC_FEATURE (3)..(3): X is I, L or V
  MISC_FEATURE (4)..(4): X is K, R or H for basic amino acids
  MISC_FEATURE (5)..(5): X is N or Q for amidated amino acids
  MISC_FEATURE (6)..(6): X is A or G
  MISC_FEATURE (7)..(7): X is D and E for acidic amino acids
  MISC_FEATURE (8)..(8): X is K, R or H for basic amino acids
  MISC_FEATURE (9)..(9): X is I, L or V
  MISC_FEATURE (10)..(10): X is D and E for acidic amino acids
  MISC_FEATURE (11)..(11): X is K, R or H for basic amino acids
  MISC_FEATURE (12)..(12): X is I, L or V
  MISC_FEATURE (13)..(13): X is D and E for acidic amino acids
  MISC_FEATURE (14)..(14): X is A or G
  MISC_FEATURE (15)..(15): X is A or G
  MISC_FEATURE (16)..(16): X is A or G
  MISC_FEATURE (17)..(17): X is D and E for acidic amino acids
  MISC_FEATURE (18)..(18): X is A or G
  MISC_FEATURE (19)..(19): X is D and E for acidic amino acids
  MISC_FEATURE (20)..(20): X is F, W or Y for aromatic amino acids
  MISC_FEATURE (21)..(21): X is K, R or H for basic amino acids
  MISC_FEATURE (22)..(22): X is K, R or H for basic amino acids
  MISC_FEATURE (23)..(23): X is D and E for acidic amino acids
  MISC_FEATURE (24)..(24): X is T or S
  MISC_FEATURE (25)..(25): X is A or G
  MISC_FEATURE (26)..(26): X is F, W or Y for aromatic amino acids
  MISC_FEATURE (27)..(27): X is D and E for acidic amino acids
  MISC_FEATURE (28)..(28): X is I, L or V
XXXXXXXXXXXXXXXXXXXXXXXXXXXX

SEQ ID NO: 313 - protein, 26 aa, Artificial
  Completely synthesized peptide construct
DLLKNGERIEKVEGGGDAEFRHDSGY

SEQ ID NO: 314 - protein, 26 aa, Artificial
  peptide construct
  MISC_FEATURE (1)..(1): X is D and E for acidic amino acids
  MISC_FEATURE (2)..(2): X is I, L or V
  MISC_FEATURE (3)..(3): X is I, L or V
  MISC_FEATURE (4)..(4): X is K, R or H for basic amino acids
  MISC_FEATURE (5)..(5): X is N or Q for amidated amino acids
  MISC_FEATURE (6)..(6): X is A or G
  MISC_FEATURE (7)..(7): X is D and E for acidic amino acids
  MISC_FEATURE (8)..(8): X is K, R or H for basic amino acids
  MISC_FEATURE (9)..(9): X is I, L or V
  MISC_FEATURE (10)..(10): X is D and E for acidic amino acids
  MISC_FEATURE (11)..(11): X is K, R or H for basic amino acids
  MISC_FEATURE (12)..(12): X is I, L or V
  MISC_FEATURE (13)..(13): X is D and E for acidic amino acids
  MISC_FEATURE (14)..(14): X is A or G
  MISC_FEATURE (15)..(15): X is A or G
  MISC_FEATURE (16)..(16): X is A or G
  MISC_FEATURE (17)..(17): X is D and E for acidic amino acids
  MISC_FEATURE (18)..(18): X is A or G
  MISC_FEATURE (19)..(19): X is D and Efor acidic amino acids
  MISC_FEATURE (20)..(20): X is F, W or Y for aromatic amino acids
  MISC_FEATURE (21)..(21): X is K, R or H for basic amino acids
  MISC_FEATURE (22)..(22): X is K, R or H for basic amino acids
  MISC_FEATURE (23)..(23): X is D and E for acidic amino acids
  MISC_FEATURE (24)..(24): X is T or S
  MISC_FEATURE (25)..(25): X is A or G
  MISC_FEATURE (26)..(26): X is F, W or Y for aromatic amino acids
XXXXXXXXXXXXXXXXXXXXXXXXXX

SEQ ID NO: 315 - protein, 20 aa, Artificial
  Completely synthesized peptide construct
DLLKNGERIEKVEGGGEFRH

SEQ ID NO: 316 - protein, 20 aa, Artificial
  peptide construct
  MISC_FEATURE (1)..(1): X  is D and E for acidic amino acids
  MISC_FEATURE (2)..(2): X is I, L or V
  MISC_FEATURE (3)..(3): X is I, L or V
  MISC_FEATURE (4)..(4): X is K, R or H for basic amino acids
  MISC_FEATURE (5)..(5): X is N or Q for aromatic amino acids
  MISC_FEATURE (6)..(6): X is A or G
  MISC_FEATURE (7)..(7): X is D and E for acidic amino acids
  MISC_FEATURE (8)..(8): X is K, R or H for basic amino acids
  MISC_FEATURE (9)..(9): X is I, L or V
  MISC_FEATURE (10)..(10): X is D and E for acidic amino acids
  MISC_FEATURE (11)..(11): X is K, R or H for basic amino acids
  MISC_FEATURE (12)..(12): X is I, L or V
  MISC_FEATURE (13)..(13): X is D and E for acidic amino acids
  MISC_FEATURE (14)..(14): X is A or G
  MISC_FEATURE (15)..(15): X is A or G
  MISC_FEATURE (16)..(16): X is A or G
  MISC_FEATURE (17)..(17): X is D and E for acidic amino acids
  MISC_FEATURE (18)..(18): X is F or P
  MISC_FEATURE (19)..(19): X is K, R or H for basic amino acids
  MISC_FEATURE (20)..(20): X is K, R or H for basic amino acids
XXXXXXXXXXXXXXXXXXXX

SEQ ID NO: 317 - protein, 35 aa, Artificial
  Completely synthesized peptide construct
DLLKNGERIEKVEGGGDSAFDVLSFTAEEKAGVYK

SEQ ID NO: 318 - protein, 35 aa, Artificial; identical to SEQ ID NO: 206
  peptide construct
  MISC_FEATURE (1)..(1): X is D and E for acidic amino acids
  MISC_FEATURE (2)..(2): X is I, L or V
  MISC_FEATURE (3)..(3): X is I, L or V
  MISC_FEATURE (4)..(4): X is K, R or H for basic amino acids
  MISC_FEATURE (5)..(5): X is N or Q for amidated amino acids
  MISC_FEATURE (6)..(6): X is A or G
  MISC_FEATURE (7)..(7): X is D and E for acidic amino acids
  MISC_FEATURE (8)..(8): X is K, R or H for basic amino acids
  MISC_FEATURE (9)..(9): X is I, L or V
  MISC_FEATURE (10)..(10): X is D and E for acidic amino acids
  MISC_FEATURE (11)..(11): X is K, R or H for basic amino acids
  MISC_FEATURE (12)..(12): X is I, L or V
  MISC_FEATURE (13)..(13): X is D and E for acidic amino acids
  MISC_FEATURE (14)..(14): X is A or G
  MISC_FEATURE (15)..(15): X is A or G
  MISC_FEATURE (16)..(16): X is A or G
  MISC_FEATURE (17)..(17): X is D and E for acidic amino acids
  MISC_FEATURE (18)..(18): X is C or S
  MISC_FEATURE (19)..(19): X is A or G
  MISC_FEATURE (20)..(20): X is F, W or Y for aromatic amino acids
  MISC_FEATURE (21)..(21): X is D and E for acidic amino acids
  MISC_FEATURE (22)..(22): X is I, L or V
  MISC_FEATURE (23)..(23): X is I, L or V
  MISC_FEATURE (24)..(24): X is C or S
  MISC_FEATURE (25)..(25): X is F, W or Y for aromatic amino acids
  MISC_FEATURE (26)..(26): X is T or S
  MISC_FEATURE (27)..(27): X is A or G
  MISC_FEATURE (28)..(28): X is D and E for acidic amino acids
  MISC_FEATURE (29)..(29): X is D and E for acidic amino acids
  MISC_FEATURE (30)..(30): X is K, R or H for basic amino acids
  MISC_FEATURE (31)..(31): X is A or G
  MISC_FEATURE (32)..(32): X is A or G
  MISC_FEATURE (33)..(33): X is I, L or V
  MISC_FEATURE (34)..(34): X is F, W or  Y for aromatic amino acids
  MISC_FEATURE (35)..(35): X is K, R or H for basic amino acids

SEQ ID NO: 319 - protein, 30 aa, Artificial
  Completely synthesized peptide construct
DLLKNGERIEKVEGGGSLKLMATLFSTYAS

SEQ ID NO: 320 - protein, 30 aa, Artificial; identical to SEQ ID NO: 58
  peptide construct
  MISC_FEATURE (1)..(1): X is D and E for acidic amino acids
  MISC_FEATURE (2)..(2): X is I, L or V
  MISC_FEATURE (3)..(3): X is I, L or V
  MISC_FEATURE (4)..(4): X is K, R or H for basic amino acids
  MISC_FEATURE (5)..(5): X is N or Q for amidated amino acids
  MISC_FEATURE (6)..(6): X is A or G
  MISC_FEATURE (7)..(7): X is D and E for acidic amino acids
  MISC_FEATURE (8)..(8): X is K, R or H for basic amino acids
  MISC_FEATURE (9)..(9): X is I, L or V
  MISC_FEATURE (10)..(10): X is D and E for acidic amino acids
  MISC_FEATURE (11)..(11): X is K, R or H for basic amino acids
  MISC_FEATURE (12)..(12): X is I, L or V
  MISC_FEATURE (13)..(13): X is D and E for acidic amino acids
  MISC_FEATURE (14)..(14): X is A or G
  MISC_FEATURE (15)..(15): X is A or G
  MISC_FEATURE (16)..(16): X is A or G
  MISC_FEATURE (17)..(17): X is C or S
  MISC_FEATURE (18)..(18): X is I, L or V
  MISC_FEATURE (19)..(19): X is K, R or H for basic amino acids
  MISC_FEATURE (20)..(20): X is I, L or V
  MISC_FEATURE (21)..(21): X is M  or Nle
  MISC_FEATURE (22)..(22): X is A or G
  MISC_FEATURE (23)..(23): X is  T or S
  MISC_FEATURE (24)..(24): X is I, L or V
  MISC_FEATURE (25)..(25): X is F or P
  MISC_FEATURE (26)..(26): X is C or S
  MISC_FEATURE (27)..(27): X is T or S
  MISC_FEATURE (28)..(28): X is F, W or Y for aromatic amino acids
  MISC_FEATURE (29)..(29): X is A or G
  MISC_FEATURE (30)..(30): X is C or S

SEQ ID NO: 321 - protein, 30 aa, Artificial
  Completely synthesized peptide construct
DLLKNGERIEKVEGGGSLKLMATLFSSYAT

SEQ ID NO: 322 - protein, 30 aa, Artificial; identical to SEQ ID NO: 58
  peptide construct
  MISC_FEATURE (1)..(1): X is D and E for acidic amino acids
  MISC_FEATURE (2)..(2): X is I, L or V
  MISC_FEATURE (3)..(3): X is I, L or V
  MISC_FEATURE (4)..(4): X is K, R or H for basic amino acids
  MISC_FEATURE (5)..(5): X is N or Q for amidated amino acids
  MISC_FEATURE (6)..(6): X is A or G
  MISC_FEATURE (7)..(7): X is D and E for acidic amino acids
  MISC_FEATURE (8)..(8): X is K, R or H for basic amino acids
  MISC_FEATURE (9)..(9): X is I, L or V
  MISC_FEATURE (10)..(10): X is D and E for acidic amino acids
  MISC_FEATURE (11)..(11): X is K, R or H for basic amino acids
  MISC_FEATURE (12)..(12): X is I, L or V
  MISC_FEATURE (13)..(13): X is D and E for acidic amino acids
  MISC_FEATURE (14)..(14): X is A or G
  MISC_FEATURE (15)..(15): X is A or G
  MISC_FEATURE (16)..(16): X is A or G
  MISC_FEATURE (17)..(17): X is C or S
  MISC_FEATURE (18)..(18): X is I, L or V
  MISC_FEATURE (19)..(19): X is K, R or H for basic amino acids
  MISC_FEATURE (20)..(20): X is I, L or V
  MISC_FEATURE (21)..(21): X is M or Nle
  MISC_FEATURE (22)..(22): X is A or G
  MISC_FEATURE (23)..(23): X is Tor S
  MISC_FEATURE (24)..(24): X is I, L or V
  MISC_FEATURE (25)..(25): X is F or P
  MISC_FEATURE (26)..(26): X is C or S
  MISC_FEATURE (27)..(27): X is C or S
  MISC_FEATURE (28)..(28): X is F, W or Y for aromatic amino acids
  MISC_FEATURE (29)..(29): X is A or G
  MISC_FEATURE (30)..(30): X is T or S

SEQ ID NO: 323 - protein, 27 aa, Artificial
  Completely synthesized peptide construct
DLKKNGERIEKVEGGGNITEIADLTQK

SEQ ID NO: 324 - protein, 27 aa, Artificial
  peptide construct
  MISC_FEATURE (1)..(1): X is D and E for acidic amino acids
  MISC_FEATURE (2)..(2): X is I, L or V
  MISC_FEATURE (3)..(3): X is I, L or V
  MISC_FEATURE (4)..(4): X is K, R or H for basic amino acids
  MISC_FEATURE (5)..(5): X is N or Q for amidated amino acids
  MISC_FEATURE (6)..(6): X is A or G
  MISC_FEATURE (7)..(7): X is D and E for acidic amino acids
  MISC_FEATURE (8)..(8): X is K, R or H for basic amino acids
  MISC_FEATURE (9)..(9): X is I, L or V
  MISC_FEATURE (10)..(10): X is D and E for acidic amino acids
  MISC_FEATURE (11)..(11): X is K,  R or H for basic amino acids
  MISC_FEATURE (12)..(12): X is I, L or V
  MISC_FEATURE (13)..(13): X is D and E for acidic amino acids
  MISC_FEATURE (14)..(14): X is A or G
  MISC_FEATURE (15)..(15): X is A or G
  MISC_FEATURE (16)..(16): X is A or G
  MISC_FEATURE (17)..(17): X is N or Q for amidated amino acids
  MISC_FEATURE (18)..(18): X is I, L or V
  MISC_FEATURE (19)..(19): X is T or S
  MISC_FEATURE (20)..(20): X is D and E for acidic amino acids
  MISC_FEATURE (21)..(21): X is I, L or V
  MISC_FEATURE (22)..(22): X is A or G
  MISC_FEATURE (23)..(23): X is D and E for acidic amino acids
  MISC_FEATURE (24)..(24): X is I, L or V
  MISC_FEATURE (25)..(25): X is T or S
  MISC_FEATURE (26)..(26): X is N or Q for amidated amino acids
  MISC_FEATURE (27)..(27): X is K, R or H for basic amino acids
XXXXXXXXXXXXXXXXXXXXXXXXXXX

SEQ ID NO: 325 - protein, 56 aa, Artificial
  Completely synthesized peptide construct
DLLKNGERIEKVEGGGNMYAMMIARFKMFPEVKEKGMAALPRLIAFTSEHSHFSLK

SEQ ID NO: 326 - protein, 56 aa, Artificial; identical to SEQ ID NO: 302
  peptide construct
  MISC_FEATURE (1)..(1): X is D and E for acidic amino acids
  MISC_FEATURE (2)..(2): X is I, L or V
  MISC_FEATURE (3)..(3): X is I, L or V
  MISC_FEATURE (4)..(4): X is K, R or H for basic amino acids
  MISC_FEATURE (5)..(5): X is N or Q for amidated amino acids
  MISC_FEATURE (6)..(6): X is A or G
  MISC_FEATURE (7)..(7): X is D and E for acidic amino acids
  MISC_FEATURE (8)..(8): X is K, R or H for basic amino acids
  MISC_FEATURE (9)..(9): X is I, L or V
  MISC_FEATURE (10)..(10): X is D and E for acidic amino acids
  MISC_FEATURE (11)..(11): X is K, R or H for basic amino acids
  MISC_FEATURE (12)..(12): X is I, L or V
  MISC_FEATURE (13)..(13): X is D and E for acidic amino acids
  MISC_FEATURE (14)..(14): X is A or G
  MISC_FEATURE (15)..(15): X is A or G
  MISC_FEATURE (16)..(16): X is A or G
  MISC_FEATURE (17)..(17): X is N or Q for amidated amino acids
  MISC_FEATURE (18)..(18): X is M or Nle
  MISC_FEATURE (19)..(19): X is F, W or Y for aromatic amino acids
  MISC_FEATURE (20)..(20): X is A or G
  MISC_FEATURE (21)..(21): X is M or Nle
  MISC_FEATURE (22)..(22): X is M or Nle
  MISC_FEATURE (23)..(23): X is I, L or V
  MISC_FEATURE (24)..(24): X is A or G
  MISC_FEATURE (25)..(25): X is K, R or H for basic amino acids
  MISC_FEATURE (26)..(26): X is F, W or Y for aromatic amino acids
  MISC_FEATURE (27)..(27): X is K, R or H for basic amino acids
  MISC_FEATURE (28)..(28): X is M or Nle
  MISC_FEATURE (29)..(29): X is F, W or Y for aromatic amino acids
  MISC_FEATURE (30)..(30): X is F or P
  MISC_FEATURE (31)..(31): X is D and E for acidic amino acids
  MISC_FEATURE (32)..(32): X is I, L or V
  MISC_FEATURE (33)..(33): X is K, R or H for basic amino acids
  MISC_FEATURE (34)..(34): X is D and E for acidic amino acids
  MISC_FEATURE (35)..(35): X is K, R or H for basic amino acids
  MISC_FEATURE (36)..(36): X is A or G
  MISC_FEATURE (37)..(37): X is M or Nle
  MISC_FEATURE (38)..(38): X is A or G
  MISC_FEATURE (39)..(39): X is A or G
  MISC_FEATURE (40)..(40): X is I, L or V
  MISC_FEATURE (41)..(41): X is F or P
  MISC_FEATURE (42)..(42): X is K, R or H for basic amino acids
  MISC_FEATURE (43)..(43): X is I, L or V
  MISC_FEATURE (44)..(44): X is I, L or V
  MISC_FEATURE (45)..(45): X is A or G
  MISC_FEATURE (46)..(46): X is F, W or Y for aromatic amino acids
  MISC_FEATURE (47)..(47): X is T or S
  MISC_FEATURE (48)..(48): X is C or S
  MISC_FEATURE (49)..(49): X is D and E for acidic amino acids
  MISC_FEATURE (50)..(50): X is K, R or H for basic amino acids
  MISC_FEATURE (51)..(51): X is C or S
  MISC_FEATURE (52)..(52): X is K, R or H for basic amino acids
  MISC_FEATURE (53)..(53): X is F, W or Y for aromatic amino acids
  MISC_FEATURE (54)..(54): X is C or S
  MISC_FEATURE (55)..(55): X is I, L or V
  MISC_FEATURE (56)..(56): X is K, R or H for basic amino acids

SEQ ID NO: 327 - protein, 50 aa, Artificial [sequence omitted]

SEQ ID NO: 328 - protein, 50 aa, Artificial
  peptide construct
  MISC_FEATURE (1)..(1): X is D and E for acidic amino acids
  MISC_FEATURE (2)..(2): X is I, L or V
  MISC_FEATURE (3)..(3): X is I, L or V
  MISC_FEATURE (4)..(4): X is K, R or H for basic amino acids
  MISC_FEATURE (5)..(5): X is N or Q for amidated amino acids
  MISC_FEATURE (6)..(6): X is A or G
  MISC_FEATURE (7)..(7): X is D and E for acidic amino acids
  MISC_FEATURE (8)..(8): X is K, R or H for basic amino acids
  MISC_FEATURE (9)..(9): X is I, L or V
  MISC_FEATURE (10)..(10): X is D and E for acidic amino acids
  MISC_FEATURE (11)..(11): X is K, R or H for basic amino acids
  MISC_FEATURE (12)..(12): X is I, L or V
  MISC_FEATURE (13)..(13): X is D and E for acidic amino acids
  MISC_FEATURE (14)..(14): X is A or G
  MISC_FEATURE (15)..(15): X is A or G
  MISC_FEATURE (16)..(16): X is A or G
  MISC_FEATURE (17)..(17): X is I, L or V
  MISC_FEATURE (18)..(18): X is A or G
  MISC_FEATURE (19)..(19): X is K, R or H for basic amino acids
  MISC_FEATURE (20)..(20): X is F, W or Y for aromatic amino acids
  MISC_FEATURE (21)..(21): X is K, R or H for basic amino acids
  MISC_FEATURE (22)..(22): X is M or Nle
  MISC_FEATURE (23)..(23): X is F, W or Y for aromatic amino acid
  MISC_FEATURE (24)..(24): X is F or P
  MISC_FEATURE (25)..(25): X is D and E for acidic amino acids
  MISC_FEATURE (26)..(26): X is I, L or V
  MISC_FEATURE (27)..(27): X is K, R or H for basic amino acids
  MISC_FEATURE (28)..(28): X is D and E for acidic amino acids
  MISC_FEATURE (29)..(29): X is K, R or H for basic amino acids
  MISC_FEATURE (30)..(30): X is A or G
  MISC_FEATURE (31)..(31): X is M or Nle
  MISC_FEATURE (32)..(32): X is A or G
  MISC_FEATURE (33)..(33): X is A or G
  MISC_FEATURE (34)..(34): X is I, L or V
  MISC_FEATURE (35)..(35): X is F or P
  MISC_FEATURE (36)..(36): X is K, R or H for basic amino acids
  MISC_FEATURE (37)..(37): X is I, L or V
  MISC_FEATURE (38)..(38): X is I, L or V
  MISC_FEATURE (39)..(39): X is A or G
  MISC_FEATURE (40)..(40): X is F, W or Y for aromatic amino acids
  MISC_FEATURE (41)..(41): X is T or S
  MISC_FEATURE (42)..(42): X is C or S
  MISC_FEATURE (43)..(43): X is D and E for acidic amino acids
  MISC_FEATURE (44)..(44): X is K, R or H for basic amino acids
  MISC_FEATURE (45)..(45): X is C or S
  MISC_FEATURE (46)..(46): X is K, R or H for basic amino acids
  MISC_FEATURE (47)..(47): X is F, W or Y for aromatic amino acids
  MISC_FEATURE (48)..(48): X is C or S
  MISC_FEATURE (49)..(49): X is I, L or V
  MISC_FEATURE (50)..(50): X is K, R or H for basic amino acids
XXXXXXXXXXXXXXXXXXXXXXXXXXXXXXXXXXXXXXXXXXXXXXXXXX

SEQ ID NO: 329 - protein, 36 aa, Artificial
  Completely synthesized peptide construct
DLLKNGERIEKVEGGGSRLSKVAPVIKARMMEYGTT

SEQ ID NO: 330 - protein, 36 aa, Artificial; identical to SEQ ID NO: 172
  peptide construct
  MISC_FEATURE (1)..(1): X is D and E for acidic amino acids
  MISC_FEATURE (2)..(2): X is I, L or V
  MISC_FEATURE (3)..(3): X is I, L or V
  MISC_FEATURE (4)..(4): X is K, R or H for basic amino acids
  MISC_FEATURE (5)..(5): X is N or Q for amidated amino acids
  MISC_FEATURE (6)..(6): X is A or G
  MISC_FEATURE (7)..(7): X is D and E for acid amino acids
  MISC_FEATURE (8)..(8): X is K, R or H for basic amino acids
  MISC_FEATURE (9)..(9): X is I, L or V
  MISC_FEATURE (10)..(10): X is D and E for acidic amino acids
  MISC_FEATURE (11)..(11): X is K, R or H for basic amino acids
  MISC_FEATURE (12)..(12): X is I, L or V
  MISC_FEATURE (13)..(13): X is D and E for acidic amino acids
  MISC_FEATURE (14)..(14): X is A or G
  MISC_FEATURE (15)..(15): X is A or G
  MISC_FEATURE (16)..(16): X is A or G
  MISC_FEATURE (17)..(17): X is C or S
  MISC_FEATURE (18)..(18): X is K, R or H for basic amino acids
  MISC_FEATURE (19)..(19): X is I, L or V
  MISC_FEATURE (20)..(20): X is C or S
  MISC_FEATURE (21)..(21): X is K, R or H for basic amino acids
  MISC_FEATURE (22)..(22): X is I, L or V
  MISC_FEATURE (23)..(23): X is A or G
  MISC_FEATURE (24)..(24): X is F or P
  MISC_FEATURE (25)..(25): X is I, L or V
  MISC_FEATURE (26)..(26): X is I, L or V
  MISC_FEATURE (27)..(27): X is K, R or H for basic amino acids
  MISC_FEATURE (28)..(28): X is A or G
  MISC_FEATURE (29)..(29): X is K, R or H for basic amino acids
  MISC_FEATURE (30)..(30): X is M or Nle
  MISC_FEATURE (31)..(31): X is M or Nle
  MISC_FEATURE (32)..(32): X is D and E for acidic amino acids
  MISC_FEATURE (33)..(33): X is F, W or Y for aromatic amino acids
  MISC_FEATURE (34)..(34): X is A or G
  MISC_FEATURE (35)..(35): X is T or S
  MISC_FEATURE (36)..(36): X is T or S

SEQ ID NO: 331 - protein, 35 aa, Artificial
  Completely synthesized peptide construct
DLKKNGERIEKVEGGGIPPSLRYLEDEERMSRLSK

SEQ ID NO: 332 - protein, 34 aa, Artificial; identical to SEQ ID NO: 79
  peptide construct
  MISC_FEATURE (1)..(1): X is D and E for acidic amino acids
  MISC_FEATURE (2)..(2): X is I, L or V
  MISC_FEATURE (3)..(3): X is I, L or V
  MISC_FEATURE (4)..(4): X is K, R or H for basic amino acids
  MISC_FEATURE (5)..(5): X is N or Q for amidated amino acids
  MISC_FEATURE (6)..(6): X is A or G
  MISC_FEATURE (7)..(7): X is D and E for acidic amino acids
  MISC_FEATURE (8)..(8): X is K, R or H for basic amino acids
  MISC_FEATURE (9)..(9): X is I, L or V
  MISC_FEATURE (10)..(10): X is D and E for acidic amino acids
  MISC_FEATURE (11)..(11): X is K, R or H for basic amino acids
  MISC_FEATURE (12)..(12): X is I, L or V
  MISC_FEATURE (13)..(13): X is D and E for acidic amino acids
  MISC_FEATURE (14)..(14): X is A or G
  MISC_FEATURE (15)..(15): X is A or G
  MISC_FEATURE (16)..(16): X is A or G
  MISC_FEATURE (17)..(17): X is I, L or V
  MISC_FEATURE (18)..(18): X is F or P
  MISC_FEATURE (19)..(19): X is F or P
  MISC_FEATURE (20)..(20): X is C or S
  MISC_FEATURE (21)..(21): X is I, L or V
  MISC_FEATURE (22)..(22): X is K, R or H for basic amino acids
  MISC_FEATURE (23)..(23): X is F, W or Y for aromatic amino acids
  MISC_FEATURE (24)..(24): X is D and E for acidic amino acids
  MISC_FEATURE (25)..(25): X is D and E for acidic amino acids
  MISC_FEATURE (26)..(26): X is D and E for acidic amino acids
  MISC_FEATURE (27)..(27): X is D and E for acidic amino acids
  MISC_FEATURE (28)..(28): X is K, R or H for basic amino acids
  MISC_FEATURE (29)..(29): X is M or Nle
  MISC_FEATURE (30)..(30): X is C or S
  MISC_FEATURE (31)..(31): X is K, R or H for basic amino acids
  MISC_FEATURE (32)..(32): X is I, L or V
  MISC_FEATURE (33)..(33): X is C or S
  MISC_FEATURE (34)..(34): X is K, R or H for basic amino acids

SEQ ID NO: 333 - protein, 35 aa, Artificial
  Completely synthesized peptide construct
DLKNGERIEKVEGGGNTNMFTYEIAPVFVLLEYVT

SEQ ID NO: 334 - protein, 36 aa, Artificial; identical to SEQ ID NO: 172
  peptide construct
  MISC_FEATURE (1)..(1): X is D and E for acidic amino acids
  MISC_FEATURE (2)..(2): X is I, L or V
  MISC_FEATURE (3)..(3): X is I, L or V
  MISC_FEATURE (4)..(4): X is K, R or H for basic amino acids
  MISC_FEATURE (5)..(5): X is N or Q for amidated amino acids
  MISC_FEATURE (6)..(6): X is A or G
  MISC_FEATURE (7)..(7): X is D and E for acidic amino acids
  MISC_FEATURE (8)..(8): X is K,  R or H for basic amino acids
  MISC_FEATURE (9)..(9): X is I, L or V
  MISC_FEATURE (10)..(10): X is D and E for acidic amino acids
  MISC_FEATURE (11)..(11): X is K, R or H for basic amino acids
  MISC_FEATURE (12)..(12): X is I, L or V
  MISC_FEATURE (13)..(13): X is D and E for acidic amino acids
  MISC_FEATURE (14)..(14): X is A or G
  MISC_FEATURE (15)..(15): X is A or G
  MISC_FEATURE (16)..(16): X is A or G
  MISC_FEATURE (17)..(17): X is N or Q for amidated amino acids
  MISC_FEATURE (18)..(18): X is T or S
  MISC_FEATURE (19)..(19): X is N or Q for amidated amino acids
  MISC_FEATURE (20)..(20): X is M or Nle
  MISC_FEATURE (21)..(21): X is F, W or Y for aromatic amino acids
  MISC_FEATURE (22)..(22): X is T or S
  MISC_FEATURE (23)..(23): X is F, W or Y for aromatic amino acids
  MISC_FEATURE (24)..(24): X is D and E for acidic amino acids
  MISC_FEATURE (25)..(25): X is I, L or V
  MISC_FEATURE (26)..(26): X is A or G
  MISC_FEATURE (27)..(27): X is F or P
  MISC_FEATURE (28)..(28): X is I, L or V
  MISC_FEATURE (29)..(29): X is F, W or Y for aromatic amino acids
  MISC_FEATURE (30)..(30): X is I, L or V
  MISC_FEATURE (31)..(31): X is I, L or V
  MISC_FEATURE (32)..(32): X is I, L or V
  MISC_FEATURE (33)..(33): X is D and E for acidic amino acids
  MISC_FEATURE (34)..(34): X is F, W or Y for aromatic amino acids
  MISC_FEATURE (35)..(35): X is I, L or V
  MISC_FEATURE (36)..(36): X is T or S

SEQ ID NO: 335 - protein, 31 aa, Artificial
  Completely synthesized peptide construct
DLLKNGERIEKVEGGGFKADEKKFWGKYLYE

SEQ ID NO: 336 - protein, 31 aa, Artificial; identical to SEQ ID NO: 130
  peptide construct
  MISC_FEATURE (1)..(1): X is D and E for acidic amino acids
  MISC_FEATURE (2)..(2): X is I, L or V
  MISC_FEATURE (3)..(3): X is I, L or V
  MISC_FEATURE (4)..(4): X is K, R or H for basic amino acids
  MISC_FEATURE (5)..(5): X is N or Q for amidated amino acids
  MISC_FEATURE (6)..(6): X is A or G
  MISC_FEATURE (7)..(7): X is D and E for acidic amino acids
  MISC_FEATURE (8)..(8): X is K, R or H for basic amino acids
  MISC_FEATURE (9)..(9): X is I, L or V
  MISC_FEATURE (10)..(10): X is D and E for acidic amino acids
  MISC_FEATURE (11)..(11): X is K, R or H for basic amino acids
  MISC_FEATURE (12)..(12): X is I, L or V
  MISC_FEATURE (13)..(13): X is D and E for acidic amino acids
  MISC_FEATURE (14)..(14): X is A or G
  MISC_FEATURE (15)..(15): X is A or G
  MISC_FEATURE (16)..(16): X is A or G
  MISC_FEATURE (17)..(17): X is F, Wor Y for aromatic amino acids
  MISC_FEATURE (18)..(18): X is K, R or H for basic amino acids
  MISC_FEATURE (19)..(19): X is A or G
  MISC_FEATURE (20)..(20): X is D and E for acidic amino acids
  MISC_FEATURE (21)..(21): X is D and E for acidic amino acids
  MISC_FEATURE (22)..(22): X is K, R or  H for basic amino acids
  MISC_FEATURE (23)..(23): X is K, R or H for basic amino acids
  MISC_FEATURE (24)..(24): X is F, W or Y for aromatic amino acids
  MISC_FEATURE (25)..(25): X is F,  W or Y for aromatic amino acids
  MISC_FEATURE (26)..(26): X is A or G
  MISC_FEATURE (27)..(27): X is K, R or H for basic amino acids
  MISC_FEATURE (28)..(28): X is F,  W or Y for aromatic amino acids
  MISC_FEATURE (29)..(29): X is I, L or V
  MISC_FEATURE (30)..(30): X is F, W or Y for aromatic amino acids
  MISC_FEATURE (31)..(31): X is D and E for acidic amino acids

SEQ ID NO: 337 - protein, 31 aa, Artificial
  Completely synthesized peptide construct
DLKKNGERIEKVEGGGSHLVEALYLVCGERG

SEQ ID NO: 338 - protein, 30 aa, Artificial; identical to SEQ ID NO: 58
  peptide construct
  MISC_FEATURE (1)..(1): X is D and E for acidic amino acids
  MISC_FEATURE (2)..(2): X is I, L or V
  MISC_FEATURE (3)..(3): X is I, L or V
  MISC_FEATURE (4)..(4): X is K, R or H for basic amino acids
  MISC_FEATURE (5)..(5): X is N or Q for amidated amino acids
  MISC_FEATURE (6)..(6): X is A or G
  MISC_FEATURE (7)..(7): X is D and E for acidic amino acids
  MISC_FEATURE (8)..(8): X is K,  R or H for basic amino acids
  MISC_FEATURE (9)..(9): X is I, L or V
  MISC_FEATURE (10)..(10): X is D and E for acidic amino acids
  MISC_FEATURE (11)..(11): X is K, R or H for basic amino acids
  MISC_FEATURE (12)..(12): X is I, L or V
  MISC_FEATURE (13)..(13): X is D and E for acidic amino acids
  MISC_FEATURE (14)..(14): X is A or G
  MISC_FEATURE (15)..(15): X is A or G
  MISC_FEATURE (16)..(16): X is A or G
  MISC_FEATURE (17)..(17): X is C or S
  MISC_FEATURE (18)..(18): X is K, R or H for basic amino acids
  MISC_FEATURE (19)..(19): X is I, L or V
  MISC_FEATURE (20)..(20): X is I, L or V
  MISC_FEATURE (21)..(21): X is D and E for acidic amino acids
  MISC_FEATURE (22)..(22): X is A or G
  MISC_FEATURE (23)..(23): X is I, L or V
  MISC_FEATURE (24)..(24): X is F, W or Y for aromatic amino acids
  MISC_FEATURE (25)..(25): X is I, L or V
  MISC_FEATURE (26)..(26): X is C or S
  MISC_FEATURE (27)..(27): X is A or G
  MISC_FEATURE (28)..(28): X is D and E for acidic amino acids
  MISC_FEATURE (29)..(29): X is K, R or H for basic amino acids
  MISC_FEATURE (30)..(30): X is A or G

SEQ ID NO: 339 - protein, 39 aa, Artificial
  Completely synthesized peptide construct
DLKNGERIEKVEGGGVLGGGCALLRCIPALDSLTPANED

SEQ ID NO: 340 - protein, 40 aa, Artificial; identical to SEQ ID NO: 54
  peptide construct
  MISC_FEATURE (1)..(1): X is D and E for acidic amino acids
  MISC_FEATURE (2)..(2): X is I, L or V
  MISC_FEATURE (3)..(3): X is I, L or V
  MISC_FEATURE (4)..(4): X is K, R or H for basic amino acids
  MISC_FEATURE (5)..(5): X is N or Q for amidated amino acids
  MISC_FEATURE (6)..(6): X is A or G
  MISC_FEATURE (7)..(7): X is D and E for acidic amino acids
  MISC_FEATURE (8)..(8): X is K, R or H for basic amino acids
  MISC_FEATURE (9)..(9): X is I, L or V
  MISC_FEATURE (10)..(10): X is D and E for acidic amino acids
  MISC_FEATURE (11)..(11): X is K, R or H for basic amino acids
  MISC_FEATURE (12)..(12): X is I, L or V
  MISC_FEATURE (13)..(13): X is D and E for acidic amino acids
  MISC_FEATURE (14)..(14): X is A or G
  MISC_FEATURE (15)..(15): X is A or G
  MISC_FEATURE (16)..(16): X is A or G
  MISC_FEATURE (17)..(17): X is I, L or V
  MISC_FEATURE (18)..(18): X is I, L or V
  MISC_FEATURE (19)..(19): X is A or G
  MISC_FEATURE (20)..(20): X is A or G
  MISC_FEATURE (21)..(21): X is A or G
  MISC_FEATURE (22)..(22): X is C or S
  MISC_FEATURE (23)..(23): X is A or G
  MISC_FEATURE (24)..(24): X is I, L or V
  MISC_FEATURE (25)..(25): X is I, L or V
  MISC_FEATURE (26)..(26): X is K, R or H for basic amino acids
  MISC_FEATURE (27)..(27): X is C or S
  MISC_FEATURE (28)..(28): X is I, L or V
  MISC_FEATURE (29)..(29): X is  F or P
  MISC_FEATURE (30)..(30): X is A or G
  MISC_FEATURE (31)..(31): X is I, L or V
  MISC_FEATURE (32)..(32): X is D and E for acidic amino acids
  MISC_FEATURE (33)..(33): X is C or S
  MISC_FEATURE (34)..(34): X is I, L or V
  MISC_FEATURE (35)..(35): X is T or S
  MISC_FEATURE (36)..(36): X is F or P
  MISC_FEATURE (37)..(37): X is A or G
  MISC_FEATURE (38)..(38): X is N or Q for amidated amino acids
  MISC_FEATURE (39)..(39): X is D and E for acidic amino acids
  MISC_FEATURE (40)..(40): X is D and E for acidic amino acids

SEQ ID NO: 341 - protein, 44 aa, Artificial
  Completely synthesized peptide construct
DLLKNGERIEKVEGGGEACVTSWLWSGEGAVFYRVDLHFINLGT

SEQ ID NO: 342 - protein, 44 aa, Artificial; identical to SEQ ID NO: 304
  peptide construct
  MISC_FEATURE (1)..(1): X is D and E for acidic amino acids
  MISC_FEATURE (2)..(2): X is I, L or V
  MISC_FEATURE (3)..(3): X is I, L or V
  MISC_FEATURE (4)..(4): X is F, W or Y for aromatic amino acids
  MISC_FEATURE (5)..(5): X is N or Q for amidated amino acids
  MISC_FEATURE (6)..(6): X is A or G
  MISC_FEATURE (7)..(7): X is D and E for acidic amino acids
  MISC_FEATURE (8)..(8): X is K, R or H for basic amino acids
  MISC_FEATURE (9)..(9): X is I, L or V
  MISC_FEATURE (10)..(10): X is D and E for acidic amino acids
  MISC_FEATURE (11)..(11): X is K, R or H for basic amino acids
  MISC_FEATURE (12)..(12): X is I, L or V
  MISC_FEATURE (13)..(13): X is D and E for acidic amino acids
  MISC_FEATURE (14)..(14): X is A or G
  MISC_FEATURE (15)..(15): X is A or G
  MISC_FEATURE (16)..(16): X is A or G
  MISC_FEATURE (17)..(17): X is D and E for acidic amino acids
  MISC_FEATURE (18)..(18): X is A or G
  MISC_FEATURE (19)..(19): X is C or S
  MISC_FEATURE (20)..(20): X is I, L or V
  MISC_FEATURE (21)..(21): X is T or S
  MISC_FEATURE (22)..(22): X is C or S
  MISC_FEATURE (23)..(23): X is F, W or Y for aromatic amino acids
  MISC_FEATURE (24)..(24): X is I, L or V
  MISC_FEATURE (25)..(25): X is F, W or Y for aromatic amino acids
  MISC_FEATURE (26)..(26): X is C or S
  MISC_FEATURE (27)..(27): X is A or G
  MISC_FEATURE (28)..(28): X is D and E for acidic amino acids
  MISC_FEATURE (29)..(29): X is A or G
  MISC_FEATURE (30)..(30): X is A or G
  MISC_FEATURE (31)..(31): X is I, L or V
  MISC_FEATURE (32)..(32): X is F, W or Y for aromatic amino acids
  MISC_FEATURE (33)..(33): X is F, W or Y for aromatic amino acids
  MISC_FEATURE (34)..(34): X is K, R or H for basic amino acids
  MISC_FEATURE (35)..(35): X is I, L or V
  MISC_FEATURE (36)..(36): X is D and  E for acidic amino acids
  MISC_FEATURE (37)..(37): X is I, L or V
  MISC_FEATURE (38)..(38): X is K, R or H for basic amino acids
  MISC_FEATURE (39)..(39): X is F, W or Y for aromatic amino acids
  MISC_FEATURE (40)..(40): X is I, L or V
  MISC_FEATURE (41)..(41): X is N or Q for amidated amino acids
  MISC_FEATURE (42)..(42): X is I, L or V
  MISC_FEATURE (43)..(43): X is A or G
  MISC_FEATURE (44)..(44): X is T or S

SEQ ID NO: 343 - protein, 36 aa, Artificial
  Completely synthesized peptide construct
DLKNGERIEKVEGGGMDFWCVEHDRPPPATPTSLTT

SEQ ID NO: 344 - protein, 37 aa, Artificial; identical to SEQ ID NO: 158
  peptide construct
  MISC_FEATURE (1)..(1): X is D and E for acidic amino acids
  MISC_FEATURE (2)..(2): X is I, L or V
  MISC_FEATURE (3)..(3): X is I, L or V
  MISC_FEATURE (4)..(4): X is K,  R or H for basic amino acids
  MISC_FEATURE (5)..(5): X is N or Q for amidated amino acids
  MISC_FEATURE (6)..(6): X is A or G
  MISC_FEATURE (7)..(7): X is D and E for acidic amino acids
  MISC_FEATURE (8)..(8): X is K, R or H for basic amino acids
  MISC_FEATURE (9)..(9): X is I, L or V
  MISC_FEATURE (10)..(10): X is D and E for acidic amino acids
  MISC_FEATURE (11)..(11): X is K, R or H for basic amino acids
  MISC_FEATURE (12)..(12): X is I, L or V
  MISC_FEATURE (13)..(13): X is D and E for acidic amino acids
  MISC_FEATURE (14)..(14): X is A or G
  MISC_FEATURE (15)..(15): X is A or G
  MISC_FEATURE (16)..(16): X is A or G
  MISC_FEATURE (17)..(17): X is M or Nle
  MISC_FEATURE (18)..(18): X is D and E for acidic amino acids
  MISC_FEATURE (19)..(19): X is F, W or Y for aromatic amino acids
  MISC_FEATURE (20)..(20): X is F, W or Y for aromatic amino acids
  MISC_FEATURE (21)..(21): X is C or S
  MISC_FEATURE (22)..(22): X is I, L or V
  MISC_FEATURE (23)..(23): X is D and E for acidic amino acids
  MISC_FEATURE (24)..(24): X is K, R or H for basic amino acids
  MISC_FEATURE (25)..(25): X is D and E for acidic amino acids
  MISC_FEATURE (26)..(26): X is K, R or H for basic amino acids
  MISC_FEATURE (27)..(27): X is F or P
  MISC_FEATURE (28)..(28): X is F or P
  MISC_FEATURE (29)..(29): X is F or P
  MISC_FEATURE (30)..(30): X is A or G
  MISC_FEATURE (31)..(31): X is T or S
  MISC_FEATURE (32)..(32): X is F or P
  MISC_FEATURE (33)..(33): X  is T or S
  MISC_FEATURE (34)..(34): X is C or S
  MISC_FEATURE (35)..(35): X is I, L or V
  MISC_FEATURE (36)..(36): X is T or S
  MISC_FEATURE (37)..(37): X is T or S

SEQ ID NO: 345 - protein, 36 aa, Artificial
  Completely synthesized peptide construct
DLLKNGERIEKVEGGGNMYAMMIARFKMFPEVKEKG

SEQ ID NO: 346 - protein, 36 aa, Artificial; identical to SEQ ID NO: 172
  peptide construct
  MISC_FEATURE (1)..(1): X is D and E for acidic amino acids
  MISC_FEATURE (2)..(2): X is I, L or V
  MISC_FEATURE (3)..(3): X is I, L or V
  MISC_FEATURE (4)..(4): X is K, R or H for basic amino acids
  MISC_FEATURE (5)..(5): X is N or Q for amidated amino acids
  MISC_FEATURE (6)..(6): X  is A or G
  MISC_FEATURE (7)..(7): X is D and E for acidic amino acids
  MISC_FEATURE (8)..(8): X is K, R or H for basic amino acids
  MISC_FEATURE (9)..(9): X is I, L or V
  MISC_FEATURE (10)..(10): X is D and E for acidic amino acids
  MISC_FEATURE (11)..(11): X is K, R or H for basic amino acids
  MISC_FEATURE (12)..(12): X is I, L or V
  MISC_FEATURE (13)..(13): X is D and E for acidic amino acids
  MISC_FEATURE (14)..(14): X is A or G
  MISC_FEATURE (15)..(15): X is A or G
  MISC_FEATURE (16)..(16): X is A or G
  MISC_FEATURE (17)..(17): X is N or Q for amidated amino acids
  MISC_FEATURE (18)..(18): X is M or Nle
  MISC_FEATURE (19)..(19): X is F, W or Y for aromatic amino acids
  MISC_FEATURE (20)..(20): X is A or G
  MISC_FEATURE (21)..(21): X is M or Nle
  MISC_FEATURE (22)..(22): X is M or Nle
  MISC_FEATURE (23)..(23): X is I, L or V
  MISC_FEATURE (24)..(24): X is A or G
  MISC_FEATURE (25)..(25): X is K, R or H for basic amino acids
  MISC_FEATURE (26)..(26): X  is F, W or Y for aromatic amino acids
  MISC_FEATURE (27)..(27): X is K, R or H for basic amino acids
  MISC_FEATURE (28)..(28): X is M or Nle
  MISC_FEATURE (29)..(29): X is F, W or Y for aromatic amino acids
  MISC_FEATURE (30)..(30): X is F or P
  MISC_FEATURE (31)..(31): X is D and E for acidic amino acids
  MISC_FEATURE (32)..(32): X is I, L or V
  MISC_FEATURE (33)..(33): X is K, R or H for basic amino acids
  MISC_FEATURE (34)..(34): X is D and E for acidic amino acids
  MISC_FEATURE (35)..(35): X is K, R or H for basic amino acids
  MISC_FEATURE (36)..(36): X is A or G

SEQ ID NO: 347 - protein, 49 aa, Artificial
  Completely synthesized peptide construct
DLLKNGERIEKVEGGGNMYAMMIARFKMFPEVKEKGMAALPRLIAFTSE

SEQ ID NO: 348 - protein, 49 aa, Artificial
  peptide construct
  MISC_FEATURE (1)..(1): X is D and E for acidic amino acids
  MISC_FEATURE (2)..(2): X is I, L or V
  MISC_FEATURE (3)..(3): X is I, L or V
  MISC_FEATURE (4)..(4): X is K, R or H for basic amino acids
  MISC_FEATURE (5)..(5): X is N or Q for amidated amino acids
  MISC_FEATURE (6)..(6): X is A or G
  MISC_FEATURE (7)..(7): X is D and E for acidic amino acids
  MISC_FEATURE (8)..(8): X is K, R or H for basic amino acids
  MISC_FEATURE (9)..(9): X is I, L or V
  MISC_FEATURE (10)..(10): X is D and E for acidic amino acids
  MISC_FEATURE (11)..(11): X is K, R or H for basic amino acids
  MISC_FEATURE (12)..(12): X is I, L or V
  MISC_FEATURE (13)..(13): X is D and E for acidic amino acids
  MISC_FEATURE (14)..(14): X is A or G
  MISC_FEATURE (15)..(15): X is A or G
  MISC_FEATURE (16)..(16): X is A or G
  MISC_FEATURE (17)..(17): X is N or Q for amidated amino acids
  MISC_FEATURE (18)..(18): X is M or Nle
  MISC_FEATURE (19)..(19): X is F, W or Y for aromatic amino acids
  MISC_FEATURE (20)..(20): X is A or G
  MISC_FEATURE (21)..(21): X is M or Nle
  MISC_FEATURE (22)..(22): X is M or Nle
  MISC_FEATURE (23)..(23): X is I, L or V
  MISC_FEATURE (24)..(24): X is A or G
  MISC_FEATURE (25)..(25): X is K, R or H for basic amino acids
  MISC_FEATURE (26)..(26): X is F, W or Y for aromatic amino acids
  MISC_FEATURE (27)..(27): X is K, R or H for basic amino acids
  MISC_FEATURE (28)..(28): X is M or Nle
  MISC_FEATURE (29)..(29): X is F, W or Y for aromatic amino acids
  MISC_FEATURE (30)..(30): X is F or P
  MISC_FEATURE (31)..(31): X is D and E for acidic amino acids
  MISC_FEATURE (32)..(32): X is I, L or V
  MISC_FEATURE (33)..(33): X is K, R or H for basic amino acids
  MISC_FEATURE (34)..(34): X is D and E for acidic amino acids
  MISC_FEATURE (35)..(35): X is K, R or H for basic amino acids
  MISC_FEATURE (36)..(36): X is A or G
  MISC_FEATURE (37)..(37): X is M or Nle
  MISC_FEATURE (38)..(38): X is A or G
  MISC_FEATURE (39)..(39): X is A or G
  MISC_FEATURE (40)..(40): X is I, L or V
  MISC_FEATURE (41)..(41): X is F or P
  MISC_FEATURE (42)..(42): X is K, R or H for basic amino acids
  MISC_FEATURE (43)..(43): X is I, L or V
  MISC_FEATURE (44)..(44): X is I, L or V
  MISC_FEATURE (45)..(45): X is A or G
  MISC_FEATURE (46)..(46): X is F,  W or Y for aromatic amino acids
  MISC_FEATURE (47)..(47): X is T or S
  MISC_FEATURE (48)..(48): X is C or S
  MISC_FEATURE (49)..(49): X is D and E for acidic amino acids
XXXXXXXXXXXXXXXXXXXXXXXXXXXXXXXXXXXXXXXXXXXXXXXXX

SEQ ID NO: 349 - protein, 29 aa, Artificial
  Completely synthesized peptide construct
DLLKNGERIEKVEGGGIAFTSEHSHFSLK

SEQ ID NO: 350 - protein, 29 aa, Artificial
  peptide construct
  MISC_FEATURE (1)..(1): X is D and E for acidic amino acids
  MISC_FEATURE (2)..(2): X is I, L or V
  MISC_FEATURE (3)..(3): X is I, L or V
  MISC_FEATURE (4)..(4): X is K, R or H for basic amino acids
  MISC_FEATURE (5)..(5): X is N or Q for amidateda mino acids
  MISC_FEATURE (6)..(6): X is A or G
  MISC_FEATURE (7)..(7): X is D and E for acidic amino acids
  MISC_FEATURE (8)..(8): X is K, R or H for basic amino acids
  MISC_FEATURE (9)..(9): X is I, L or V
  MISC_FEATURE (10)..(10): X is D and E for acidic amino acids
  MISC_FEATURE (11)..(11): X is K, R or H for basic amino acids
  MISC_FEATURE (12)..(12): X is I, L or V
  MISC_FEATURE (13)..(13): X is D and E for acidic amino acids
  MISC_FEATURE (14)..(14): X is A or G
  MISC_FEATURE (15)..(15): X is A or G
  MISC_FEATURE (16)..(16): X is A or G
  MISC_FEATURE (17)..(17): X is I, L or V
  MISC_FEATURE (18)..(18): X is A or G
  MISC_FEATURE (19)..(19): X is F, W or Y for aromatic amino acids
  MISC_FEATURE (20)..(20): X is T or S
  MISC_FEATURE (21)..(21): X is C or S
  MISC_FEATURE (22)..(22): X is D and E for acidic amino acids
  MISC_FEATURE (23)..(23): X is K,  R or H for basic amino acids
  MISC_FEATURE (24)..(24): X is C or S
  MISC_FEATURE (25)..(25): X is K, R or H for basic amino acids
  MISC_FEATURE (26)..(26): X is F, W or Y for aromatic amino acids
  MISC_FEATURE (27)..(27): X is C or S
  MISC_FEATURE (28)..(28): X is I, L or V
  MISC_FEATURE (29)..(29): X is K,R or H for basic amino acids
XXXXXXXXXXXXXXXXXXXXXXXXXXXXX

SEQ ID NO: 351 - protein, 37 aa, Artificial
  Completely synthesized peptide construct
DLLKNGERIEKVEGGGMDFWCVEHDRPPPATPTSLTT

SEQ ID NO: 352 - protein, 37 aa, Artificial; identical to SEQ ID NO: 158
  peptide construct
  MISC_FEATURE (1)..(1): X is D and E for acidic amino acids
  MISC_FEATURE (2)..(2): X is I, L or V
  MISC_FEATURE (3)..(3): X is I, L or V
  MISC_FEATURE (4)..(4): X is K, R or H for basic amino acids
  MISC_FEATURE (5)..(5): X is N or Q for amidated amino acids
  MISC_FEATURE (6)..(6): X is A or G
  MISC_FEATURE (7)..(7): X is D and E for acidic amino acids
  MISC_FEATURE (8)..(8): X is K, R or H for basic amino acids
  MISC_FEATURE (9)..(9): X is I, L or V
  MISC_FEATURE (10)..(10): X is D and E for acidic amino acids
  MISC_FEATURE (11)..(11): X is K, R or H for basic amino acids
  MISC_FEATURE (12)..(12): X is I, L or V
  MISC_FEATURE (13)..(13): X is D and E for acidic amino acids
  MISC_FEATURE (14)..(14): X is A or G
  MISC_FEATURE (15)..(15): X is A or G
  MISC_FEATURE (16)..(16): X is A or G
  MISC_FEATURE (17)..(17): X is M or Nle
  MISC_FEATURE (18)..(18): X is D and E for acidic amino acids
  MISC_FEATURE (19)..(19): X is F, W or Y for aromatic amino acids
  MISC_FEATURE (20)..(20): X is F, W or Y for aromatic amino acids
  MISC_FEATURE (21)..(21): X is C or S
  MISC_FEATURE (22)..(22): X is I, L or V
  MISC_FEATURE (23)..(23): X is D and  E for acidic amino acids
  MISC_FEATURE (24)..(24): X is K, R or H for basic amino acids
  MISC_FEATURE (25)..(25): X is D and E for acidic amino acids
  MISC_FEATURE (26)..(26): X is K, R or H for basic amino acids
  MISC_FEATURE (27)..(27): X is F  or P
  MISC_FEATURE (28)..(28): X is F  or P
  MISC_FEATURE (29)..(29): X is F  or P
  MISC_FEATURE (30)..(30): X is A or G
  MISC_FEATURE (31)..(31): X is T or S
  MISC_FEATURE (32)..(32): X is F or P
  MISC_FEATURE (33)..(33): X is T or S
  MISC_FEATURE (34)..(34): X is C or S
  MISC_FEATURE (35)..(35): X is I, L or V
  MISC_FEATURE (36)..(36): X is T or S
  MISC_FEATURE (37)..(37): X is T or S

SEQ ID NO: 353 - protein, 26 aa, Artificial
  Completely synthesized peptide construct
DLLKNGERIEKVEGGGERPTLAFLQD

SEQ ID NO: 354 - protein, 26 aa, Artificial
  peptide construct
  MISC_FEATURE (1)..(1): X is D and E for acidic amino acids
  MISC_FEATURE (2)..(2): X is I, L or V
  MISC_FEATURE (3)..(3): X is I, L or V
  MISC_FEATURE (4)..(4): X is K, R or H for basic amino acids
  MISC_FEATURE (5)..(5): X is N or Q for amidated amino acids
  MISC_FEATURE (6)..(6): X is A or G
  MISC_FEATURE (7)..(7): X is D and E for acidic amino acids
  MISC_FEATURE (8)..(8): X is K, R or H for basic amino acids
  MISC_FEATURE (9)..(9): X is I, L or V
  MISC_FEATURE (10)..(10): X is D and E for acidic amino acids
  MISC_FEATURE (11)..(11): X is K, R or H for basic amino acids
  MISC_FEATURE (12)..(12): X is I, L or V
  MISC_FEATURE (13)..(13): X is D and E for acidic amino acids
  MISC_FEATURE (14)..(14): X is A or G
  MISC_FEATURE (15)..(15): X is A or G
  MISC_FEATURE (16)..(16): X is A or G
  MISC_FEATURE (17)..(17): X is D and E for acidic amino acids
  MISC_FEATURE (18)..(18): X is K, R or H for basic amino acids
  MISC_FEATURE (19)..(19): X is F or P
  MISC_FEATURE (20)..(20): X is T or S
  MISC_FEATURE (21)..(21): X is I, L or V
  MISC_FEATURE (22)..(22): X is A or G
  MISC_FEATURE (23)..(23): X is F, W or Y for aromatic amino acids
  MISC_FEATURE (24)..(24): X is I, L or V
  MISC_FEATURE (25)..(25): X is N or Q for amidated amino acids
  MISC_FEATURE (26)..(26): X is D and E for acidic amino acids
XXXXXXXXXXXXXXXXXXXXXXXXXX

SEQ ID NO: 355 - protein, 26 aa, Artificial
  Completely synthesized peptide construct
DLLKNGERIEKVEGGGDRSTKVIDFH

SEQ ID NO: 356 - protein, 26 aa, Artificial
  peptide construct
  MISC_FEATURE (1)..(1): X is D and E for acidic amino acids
  MISC_FEATURE (2)..(2): X is I, L or V
  MISC_FEATURE (3)..(3): X is I, L or V
  MISC_FEATURE (4)..(4): X is K, R or H for basic amino acids
  MISC_FEATURE (5)..(5): X is N or Q for amidated amino acids
  MISC_FEATURE (6)..(6): X is A or G
  MISC_FEATURE (7)..(7): X is D and E for acidic amino acids
  MISC_FEATURE (8)..(8): X is K, R or H for basic amino acids
  MISC_FEATURE (9)..(9): X is I, L or V
  MISC_FEATURE (10)..(10): X is D and E for acidic amino acids
  MISC_FEATURE (11)..(11): X is K, R or H for basic amino acids
  MISC_FEATURE (12)..(12): X is I, L or V
  MISC_FEATURE (13)..(13): X is D and E for acidic amino acids
  MISC_FEATURE (14)..(14): X is A or G
  MISC_FEATURE (15)..(15): X is A or G
  MISC_FEATURE (16)..(16): X is A or G
  MISC_FEATURE (17)..(17): X is D and E for acidic amino acids
  MISC_FEATURE (18)..(18): X is K, R or H for basic amino acids
  MISC_FEATURE (19)..(19): X is C or S
  MISC_FEATURE (20)..(20): X is T or S
  MISC_FEATURE (21)..(21): X is K, R or H for basic amino acids
  MISC_FEATURE (22)..(22): X is I, L or V
  MISC_FEATURE (23)..(23): X is I, L or V
  MISC_FEATURE (24)..(24): X is D and E for acidic amino acids
  MISC_FEATURE (25)..(25): X is F, W or Y for aromatic amino acids
  MISC_FEATURE (26)..(26): X is K, R or H for basic amino acids
XXXXXXXXXXXXXXXXXXXXXXXXXX

SEQ ID NO: 357 - protein, 29 aa, Artificial
  Completely synthesized peptide construct
DLLKNGERIEKVEGGGIAGFKGEQGPKGE

SEQ ID NO: 358 - protein, 29 aa, Artificial
  peptide construct
  MISC_FEATURE (1)..(1): X is D and E for acidic amino acids
  MISC_FEATURE (2)..(2): X is I, L or V
  MISC_FEATURE (3)..(3): X is I, L or V
  MISC_FEATURE (4)..(4): X is K, R or H for basic amino acids
  MISC_FEATURE (5)..(5): X is N or Q for amidated amino acids
  MISC_FEATURE (6)..(6): X is A or G
  MISC_FEATURE (7)..(7): X is D and E for acidic amino acids
  MISC_FEATURE (8)..(8): X is K, R or H for basic amino acids
  MISC_FEATURE (9)..(9): X is I, L or V
  MISC_FEATURE (10)..(10): X is D and E for acidic amino acids
  MISC_FEATURE (11)..(11): X is K, R or H for basic amino acids
  MISC_FEATURE (12)..(12): X is I, L or V
  MISC_FEATURE (13)..(13): X is D and E for acidic amino acids
  MISC_FEATURE (14)..(14): X is A or G
  MISC_FEATURE (15)..(15): X is A or G
  MISC_FEATURE (16)..(16): X is A or G
  MISC_FEATURE (17)..(17): X is I, L or V
  MISC_FEATURE (18)..(18): X is A or G
  MISC_FEATURE (19)..(19): X is A or G
  MISC_FEATURE (20)..(20): X is F, W or Y for aromatic amino acids
  MISC_FEATURE (21)..(21): X is K, R or H for basic amino acids
  MISC_FEATURE (22)..(22): X is A or G
  MISC_FEATURE (23)..(23): X is D and E for acidic amino acids
  MISC_FEATURE (24)..(24): X is N or Q for amidated amino acids
  MISC_FEATURE (25)..(25): X is A or G
  MISC_FEATURE (26)..(26): X is F or P
  MISC_FEATURE (27)..(27): X is K, R or H for basic amino acids
  MISC_FEATURE (28)..(28): X is A or G
  MISC_FEATURE (29)..(29): X is D and E for acidic amino acids
XXXXXXXXXXXXXXXXXXXXXXXXXXXXX

SEQ ID NO: 359 - protein, 16 aa, Artificial
  Completely synthesized peptide construct
DLLKNGERIEKVEGGG

SEQ ID NO: 360 - protein, 16 aa, Artificial
  peptide construct
  MISC_FEATURE (1)..(1): X is D and E for acidic amino acids
  MISC_FEATURE (2)..(2): X is I, L or V
  MISC_FEATURE (3)..(3): X is I, L or V
  MISC_FEATURE (4)..(4): X is K, R or H for basic amino acids
  MISC_FEATURE (5)..(5): X is N or Q for amidated amino acids
  MISC_FEATURE (6)..(6): X is A or G
  MISC_FEATURE (7)..(7): X is D and E for acidic amino acids
  MISC_FEATURE (8)..(8): X is K, R or H for basic amino acids
  MISC_FEATURE (9)..(9): X is I, L or V
  MISC_FEATURE (10)..(10): X is D and E for acidic amino acids
  MISC_FEATURE (11)..(11): X is K, R or H for basic amino acids
  MISC_FEATURE (12)..(12): X is I, L or V
  MISC_FEATURE (13)..(13): X is D and E for acidic amino acids
  MISC_FEATURE (14)..(14): X is A or G
  MISC_FEATURE (15)..(15): X is A or G
  MISC_FEATURE (16)..(16): X is A or G
XXXXXXXXXXXXXXXX

SEQ ID NO: 361 - protein, 24 aa, Artificial
  Completely synthesized peptide construct
DLLKNGERIEKVEGGGKNIVTPRT

SEQ ID NO: 362 - protein, 24 aa, Artificial
  peptide construct
  MISC_FEATURE (1)..(1): X is D and E for acidic amino acids
  MISC_FEATURE (2)..(2): X is I, L or V
  MISC_FEATURE (3)..(3): X is I, L or V
  MISC_FEATURE (4)..(4): X is K, R or H for basic amino acids
  MISC_FEATURE (5)..(5): X is N or Q for amidated amino acids
  MISC_FEATURE (6)..(6): X is A or G
  MISC_FEATURE (7)..(7): X is D and E for acidic amino acids
  MISC_FEATURE (8)..(8): X is K, R or H for basic amino acids
  MISC_FEATURE (9)..(9): X is I, L or V
  MISC_FEATURE (10)..(10): X is D and E for acidic amino acids
  MISC_FEATURE (11)..(11): X is K, R or H for basic amino acids
  MISC_FEATURE (12)..(12): X is I, L or V
  MISC_FEATURE (13)..(13): X is D and E for acidic amino acids
  MISC_FEATURE (14)..(14): X is A or G
  MISC_FEATURE (15)..(15): X is A or G
  MISC_FEATURE (16)..(16): X is A or G
  MISC_FEATURE (17)..(17): X is K, R or H for basic amino acids
  MISC_FEATURE (18)..(18): X is N or Q for amidated amino acids
  MISC_FEATURE (19)..(19): X is I, L or V
  MISC_FEATURE (20)..(20): X is I, L or V
  MISC_FEATURE (21)..(21): X is T or S
  MISC_FEATURE (22)..(22): X is F or P
  MISC_FEATURE (23)..(23): X is K, R or H for basic amino acids
  MISC_FEATURE (24)..(24): X is T or S
XXXXXXXXXXXXXXXXXXXXXXXX

SEQ ID NO: 363 - protein, 31 aa, Artificial
  Completely synthesized peptide construct
DLLKNGERIEKVEGGGGDKVSFFCKNKEKKC

SEQ ID NO: 364 - protein, 31 aa, Artificial; identical to SEQ ID NO: 130
  peptide construct
  MISC_FEATURE (1)..(1): X is D and E for acidic amino acids
  MISC_FEATURE (2)..(2): X is I, L or V
  MISC_FEATURE (3)..(3): X is I, L or V
  MISC_FEATURE (4)..(4): X is K, R or H for basic amino acids
  MISC_FEATURE (5)..(5): X is N or Q for amidated amino acids
  MISC_FEATURE (6)..(6): X is A or G
  MISC_FEATURE (7)..(7): X is D and E for acidic amino acids
  MISC_FEATURE (8)..(8): X is K, R or H for basic amino acids
  MISC_FEATURE (9)..(9): X is I, L or V
  MISC_FEATURE (10)..(10): X is D and E for acidic amino acids
  MISC_FEATURE (11)..(11): X is K, R or H for basic amino acids
  MISC_FEATURE (12)..(12): X is I, L or V
  MISC_FEATURE (13)..(13): X is D and E for acidic amino acids
  MISC_FEATURE (14)..(14): X is A or G
  MISC_FEATURE (15)..(15): X is A or G
  MISC_FEATURE (16)..(16): X is A or G
  MISC_FEATURE (17)..(17): X is A or G
  MISC_FEATURE (18)..(18): X is D and E for acidic amino acids
  MISC_FEATURE (19)..(19): X is K, R or H for basic amino acids
  MISC_FEATURE (20)..(20): X is I, L or V
  MISC_FEATURE (21)..(21): X is C or S
  MISC_FEATURE (22)..(22): X is F, W or Y for aromatic amino acids
  MISC_FEATURE (23)..(23): X is F, W or Y for aromatic amino acids
  MISC_FEATURE (24)..(24): X is C or S
  MISC_FEATURE (25)..(25): X is K, R or H for basic amino acids
  MISC_FEATURE (26)..(26): X is N or Q for aromatic amino acids
  MISC_FEATURE (27)..(27): X is K, R or H for basic amino acids
  MISC_FEATURE (28)..(28): X is D and E for acidic amino acids
  MISC_FEATURE (29)..(29): X is K, R or H for basic amino acids
  MISC_FEATURE (30)..(30): X is K, R or H for basic amino acids
  MISC_FEATURE (31)..(31): X is C or S

SEQ ID NO: 365 - protein, 33 aa, Artificial
  Completely synthesized peptide construct
DLLKNGERIEKVEGGGEIIVTHFPFDEQNCSMK

SEQ ID NO: 366 - protein, 33 aa, Artificial; identical to SEQ ID NO: 99
  peptide construct
  MISC_FEATURE (1)..(1): X is D and E for acidic amino acids
  MISC_FEATURE (2)..(2): X is I, L or V
  MISC_FEATURE (3)..(3): X is I, L or V
  MISC_FEATURE (4)..(4): X is K, R or H for basic amino acids
  MISC_FEATURE (5)..(5): X is N or Q for amidated amino acids
  MISC_FEATURE (6)..(6): X is A or G
  MISC_FEATURE (7)..(7): X is D and E for acidic amino acids
  MISC_FEATURE (8)..(8): X is K, R or H for basic amino acids
  MISC_FEATURE (9)..(9): X is I, L or V
  MISC_FEATURE (10)..(10): X is D and E for acidic amino acids
  MISC_FEATURE (11)..(11): X is K, R or H for basic amino acids
  MISC_FEATURE (12)..(12): X is I, L or V
  MISC_FEATURE (13)..(13): X is D and E for acidic amino acids
  MISC_FEATURE (14)..(14): X is A or G
  MISC_FEATURE (15)..(15): X is A or G
  MISC_FEATURE (16)..(16): X is A or G
  MISC_FEATURE (17)..(17): X is D and E for acidic amino acids
  MISC_FEATURE (18)..(18): X is I, L or V
  MISC_FEATURE (19)..(19): X is I, L or V
  MISC_FEATURE (20)..(20): X is I, L or V
  MISC_FEATURE (21)..(21): X is T or S
  MISC_FEATURE (22)..(22): X is K, R or H for basic amino acids
  MISC_FEATURE (23)..(23): X is F, W or Y for aromatic amino acids
  MISC_FEATURE (24)..(24): X is F or P
  MISC_FEATURE (25)..(25): X is F, W or Y for aromatic amino acids
  MISC_FEATURE (26)..(26): X is D and E for acidic amino acids
  MISC_FEATURE (27)..(27): X is D and E for acidic amino acids
  MISC_FEATURE (28)..(28): X is N or Q for aromatic amino acids
  MISC_FEATURE (29)..(29): X is N or Q for aromatic amino acids
  MISC_FEATURE (30)..(30): X is C or S
  MISC_FEATURE (31)..(31): X is C or S
  MISC_FEATURE (32)..(32): X is M or Nle
  MISC_FEATURE (33)..(33): X is K, R or H for basic amino acids

SEQ ID NO: 367 - protein, 29 aa, Artificial
  Completely synthesized peptide construct
DLLKNGERIEKVEGGGVHFFKNIVTPRTP

SEQ ID NO: 368 - protein, 29 aa, Artificial
  peptide construct
  MISC_FEATURE (1)..(1): X is D and E for acidic amino acids
  MISC_FEATURE (2)..(2): X is I, L or V
  MISC_FEATURE (3)..(3): X is I, L or V
  MISC_FEATURE (4)..(4): X is K, R or H for basic amino acids
  MISC_FEATURE (5)..(5): X is N or Q for amidated amino acids
  MISC_FEATURE (6)..(6): X is A or G
  MISC_FEATURE (7)..(7): X is D and E for acidic amino acids
  MISC_FEATURE (8)..(8): X is K, R or H for basic amino acids
  MISC_FEATURE (9)..(9): X is I, L or V
  MISC_FEATURE (10)..(10): X is D and E for acidic amino acids
  MISC_FEATURE (11)..(11): X is K, R or H for basic amino acids
  MISC_FEATURE (12)..(12): X is I, L or V
  MISC_FEATURE (13)..(13): X is D and E for acidic amino acids
  MISC_FEATURE (14)..(14): X is A or G
  MISC_FEATURE (15)..(15): X is A or G
  MISC_FEATURE (16)..(16): X is A or G
  MISC_FEATURE (17)..(17): X is I, L or V
  MISC_FEATURE (18)..(18): X is K, R or H for basic amino acids
  MISC_FEATURE (19)..(19): X is F, W or Y for aromatic amino acids
  MISC_FEATURE (20)..(20): X is F, W or Y for aromatic amino acids
  MISC_FEATURE (21)..(21): X is K, R or H for basic amino acids
  MISC_FEATURE (22)..(22): X is N or Q for amidated amino acids
  MISC_FEATURE (23)..(23): X is I, L or V
  MISC_FEATURE (24)..(24): X is I,  L or V
  MISC_FEATURE (25)..(25): X is T or S
  MISC_FEATURE (26)..(26): X is F or P
  MISC_FEATURE (27)..(27): X is K, R or H for basic amino acids
  MISC_FEATURE (28)..(28): X is T or S
  MISC_FEATURE (29)..(29): X is F or P
XXXXXXXXXXXXXXXXXXXXXXXXXXXXX

SEQ ID NO: 369 - protein, 33 aa, Artificial
  Completely synthesized peptide construct
DLLKNGERIEKVEGGGYQQLNSERGVPNENIEN

SEQ ID NO: 370 - protein, 33 aa, Artificial; identical to SEQ ID NO: 99
  peptide construct
  MISC_FEATURE (1)..(1): X is D and E for acidic amino acids
  MISC_FEATURE (2)..(2): X is I, L or V
  MISC_FEATURE (3)..(3): X is I, L or V
  MISC_FEATURE (4)..(4): X is K, R or H for basic amino acids
  MISC_FEATURE (5)..(5): X is N or Q for amidated amino acids
  MISC_FEATURE (6)..(6): X is A or G
  MISC_FEATURE (7)..(7): X is D and E for acidic amino acids
  MISC_FEATURE (8)..(8): X is K, R or H for basic amino acids
  MISC_FEATURE (9)..(9): X is I, L or V
  MISC_FEATURE (10)..(10): X is D and E for acidic amino acids
  MISC_FEATURE (11)..(11): X is K, R or H for basic amino acids
  MISC_FEATURE (12)..(12): X is I, L or V
  MISC_FEATURE (13)..(13): X is D and E for acidic amino acids
  MISC_FEATURE (14)..(14): X is A or G
  MISC_FEATURE (15)..(15): X is A or G
  MISC_FEATURE (16)..(16): X is A or G
  MISC_FEATURE (17)..(17): X is F, W or Y for aromatic amino acids
  MISC_FEATURE (18)..(18): X is N or Q for aromatic amino acids
  MISC_FEATURE (19)..(19): X is N or Q for amidated amino acids
  MISC_FEATURE (20)..(20): X is I, L or V
  MISC_FEATURE (21)..(21): X is N or Q for amidated amino acids
  MISC_FEATURE (22)..(22): X is C or S
  MISC_FEATURE (23)..(23): X is D and E for acidic amino acids
  MISC_FEATURE (24)..(24): X is K, R or H for basic amino acids
  MISC_FEATURE (25)..(25): X is A or G
  MISC_FEATURE (26)..(26): X is I, L or V
  MISC_FEATURE (27)..(27): X is F or P
  MISC_FEATURE (28)..(28): X is N or Q for amidated amino acids
  MISC_FEATURE (29)..(29): X is D and E for acidic amino acids
  MISC_FEATURE (30)..(30): X is N or Q for amidated amino acids
  MISC_FEATURE (31)..(31): X is I, L or V
  MISC_FEATURE (32)..(32): X is D and E for acidic amino acids
  MISC_FEATURE (33)..(33): X is N or Q for amidated amino acids

SEQ ID NO: 371 - protein, 29 aa, Artificial
  Completely synthesized peptide construct
DLLKNGERIEKVEGGGVFIKRVSNVIIHG

SEQ ID NO: 372 - protein, 29 aa, Artificial
  peptide construct
  MISC_FEATURE (1)..(1): X is D and E for acidic amino acids
  MISC_FEATURE (2)..(2): X is I, L or V
  MISC_FEATURE (3)..(3): X is I, L or V
  MISC_FEATURE (4)..(4): X is K, R or H for basic amino acids
  MISC_FEATURE (5)..(5): X is N or Q for amidated amino acids
  MISC_FEATURE (6)..(6): X is A or G
  MISC_FEATURE (7)..(7): X is D and E for acidic amino acids
  MISC_FEATURE (8)..(8): X is K, R or H for basic amino acids
  MISC_FEATURE (9)..(9): X is I, L or V
  MISC_FEATURE (10)..(10): X is D and E for acidic amino acids
  MISC_FEATURE (11)..(11): X is K, R or H for basic amino acids
  MISC_FEATURE (12)..(12): X is I, L or V
  MISC_FEATURE (13)..(13): X is D and E for acidic amino acids
  MISC_FEATURE (14)..(14): X is A or G
  MISC_FEATURE (15)..(15): X is A or G
  MISC_FEATURE (16)..(16): X is A or G
  MISC_FEATURE (17)..(17): X is I, L or V
  MISC_FEATURE (18)..(18): X is F, W or Y for aromatic amino acids
  MISC_FEATURE (19)..(19): X is I, L or V
  MISC_FEATURE (20)..(20): X is K, R or H for basic amino acids
  MISC_FEATURE (21)..(21): X is K, R or H for basic amino acids
  MISC_FEATURE (22)..(22): X is I, L or V
  MISC_FEATURE (23)..(23): X is C or S
  MISC_FEATURE (24)..(24): X is N or Q for amidated amino acids
  MISC_FEATURE (25)..(25): X is I, L or V
  MISC_FEATURE (26)..(26): X is I, L or V
  MISC_FEATURE (27)..(27): X is I, L or V
  MISC_FEATURE (28)..(28): X is K, R or H for basic amino acids
  MISC_FEATURE (29)..(29): X is A or G
XXXXXXXXXXXXXXXXXXXXXXXXXXXXX

SEQ ID NO: 373 - protein, 31 aa, Artificial
  Completely synthesized peptide construct
DLLKNGERIEKVEGGGMKVTVAFNQFGPNRR

SEQ ID NO: 374 - protein, 31 aa, Artificial; identical to SEQ ID NO: 130
  peptide construct
  MISC_FEATURE (1)..(1): X is D and E for acidic amino acids
  MISC_FEATURE (2)..(2): X is I, L or V
  MISC_FEATURE (3)..(3): X is I, L or V
  MISC_FEATURE (4)..(4): X is K, R or H for basic amino acids
  MISC_FEATURE (5)..(5): X is N or Q for amidated amino acids
  MISC_FEATURE (6)..(6): X is A or G
  MISC_FEATURE (7)..(7): X is D and E for acidic amino acids
  MISC_FEATURE (8)..(8): X is K, R or H for basic amino acids
  MISC_FEATURE (9)..(9): X is I, L or V
  MISC_FEATURE (10)..(10): X is D and E for acidic amino acids
  MISC_FEATURE (11)..(11): X is K, R or H for basic amino acids
  MISC_FEATURE (12)..(12): X is I, L or V
  MISC_FEATURE (13)..(13): X is D and E for acidic amino acids
  MISC_FEATURE (14)..(14): X is A or G
  MISC_FEATURE (15)..(15): X is A or G
  MISC_FEATURE (16)..(16): X is A or G
  MISC_FEATURE (17)..(17): X is M or Nle
  MISC_FEATURE (18)..(18): X is K, R or H for basic amino acids
  MISC_FEATURE (19)..(19): X is I,  L or V
  MISC_FEATURE (20)..(20): X is T or S
  MISC_FEATURE (21)..(21): X is I, L or V
  MISC_FEATURE (22)..(22): X is A or G
  MISC_FEATURE (23)..(23): X is F, W or Y for aromatic amino acids
  MISC_FEATURE (24)..(24): X is N or Q for amidated amino acids
  MISC_FEATURE (25)..(25): X is N or Q for amidated amino acids
  MISC_FEATURE (26)..(26): X is F, W or Y for aromatic amino acids
  MISC_FEATURE (27)..(27): X is A or G
  MISC_FEATURE (28)..(28): X is F or P
  MISC_FEATURE (29)..(29): X is N or Q for amidated amino acids
  MISC_FEATURE (30)..(30): X is K, R or H for basic amino acids
  MISC_FEATURE (31)..(31): X is K, R or H for basic amino acids

SEQ ID NO: 375 - protein, 31 aa, Artificial
  Completely synthesized peptide construct
DLLKNGERIEKVEGGGIASRRVDGIIAAYQN

SEQ ID NO: 376 - protein, 31 aa, Artificial; identical to SEQ ID NO: 130
  peptide construct
  MISC_FEATURE (1)..(1): X is D and E for acidic amino acids
  MISC_FEATURE (2)..(2): X is I, L or V
  MISC_FEATURE (3)..(3): X is I, L or V
  MISC_FEATURE (4)..(4): X is K, R or H for basic amino
  MISC_FEATURE (5)..(5): X is N or Q for amidated amino acids
  MISC_FEATURE (6)..(6): X is A or G
  MISC_FEATURE (7)..(7): X is D and E for acidic amino acids
  MISC_FEATURE (8)..(8): X is K, R or H for basic amino acids
  MISC_FEATURE (9)..(9): X is I, L or V
  MISC_FEATURE (10)..(10): X is D and E for acidic amino acids
  MISC_FEATURE (11)..(11): X is K, R or H for basic amino acids
  MISC_FEATURE (12)..(12): X is I, L or V
  MISC_FEATURE (13)..(13): X is D and E for acidic amino acids
  MISC_FEATURE (14)..(14): X is A or G
  MISC_FEATURE (15)..(15): X is A or G
  MISC_FEATURE (16)..(16): X is A or G
  MISC_FEATURE (17)..(17): X is I, L or V
  MISC_FEATURE (18)..(18): X is A or G
  MISC_FEATURE (19)..(19): X is C or S
  MISC_FEATURE (20)..(20): X is K, R or H for basic amino acids
  MISC_FEATURE (21)..(21): X is K, R or H for basic amino acids
  MISC_FEATURE (22)..(22): X is I, L or V
  MISC_FEATURE (23)..(23): X is D and E for acidic amino acids
  MISC_FEATURE (24)..(24): X is A or G
  MISC_FEATURE (25)..(25): X is I, L or V
  MISC_FEATURE (26)..(26): X is I, L or V
  MISC_FEATURE (27)..(27): X is A or G
  MISC_FEATURE (28)..(28): X is A or G
  MISC_FEATURE (29)..(29): X is F, W or Y for aromatic amino acids
  MISC_FEATURE (30)..(30): X is N or Q for aromatic amino acids
  MISC_FEATURE (31)..(31): X is N or Q for aromatic amino acids

SEQ ID NO: 377 - protein, 35 aa, Artificial
  Completely synthesized peptide construct
DLLKNGERIEKVEGGGIDIFASKNFHLQKNTIGTG

SEQ ID NO: 378 - protein, 35 aa, Artificial; identical to SEQ ID NO: 206
  peptide construct
  MISC_FEATURE (1)..(1): X is D and E for acidic amino acids
  MISC_FEATURE (2)..(2): X is I, L or V
  MISC_FEATURE (3)..(3): X is I, L or V
  MISC_FEATURE (4)..(4): X is K, R or H for basic amino acids
  MISC_FEATURE (5)..(5): X is N or Q for amidated amino acids
  MISC_FEATURE (6)..(6): X is A or G
  MISC_FEATURE (7)..(7): X is D and E for acidic amino acids
  MISC_FEATURE (8)..(8): X is K, R or H for basic amino acids
  MISC_FEATURE (9)..(9): X is I, L or V
  MISC_FEATURE (10)..(10): X is D and E for acidic amino acids
  MISC_FEATURE (11)..(11): X is K, R or H for basic amino acids
  MISC_FEATURE (12)..(12): X is I, L or V
  MISC_FEATURE (13)..(13): X is D and E for acidic amino acids
  MISC_FEATURE (14)..(14): X is A or G
  MISC_FEATURE (15)..(15): X is A or G
  MISC_FEATURE (16)..(16): X is A or G
  MISC_FEATURE (17)..(17): X is I, L or V
  MISC_FEATURE (18)..(18): X is D and E for acidic amino acids
  MISC_FEATURE (19)..(19): X is I, L or V
  MISC_FEATURE (20)..(20): X is F, W or Y for aromatic amino acids
  MISC_FEATURE (21)..(21): X is A or G
  MISC_FEATURE (22)..(22): X is C or S
  MISC_FEATURE (23)..(23): X is K, R or H for basic amino acids
  MISC_FEATURE (24)..(24): X is N or Q for amidated amino acids
  MISC_FEATURE (25)..(25): X is F, W or Y for aromatic amino acids
  MISC_FEATURE (26)..(26): X is K, R or H for basic amino acids
  MISC_FEATURE (27)..(27): X is I, L or V
  MISC_FEATURE (28)..(28): X is N or Q for amidated amino acids
  MISC_FEATURE (29)..(29): X is K, R or H for basic amino acids
  MISC_FEATURE (30)..(30): X is N or Q for amidated amino acids
  MISC_FEATURE (31)..(31): X is T or S
  MISC_FEATURE (32)..(32): X is I, L or V
  MISC_FEATURE (33)..(33): X is A or G
  MISC_FEATURE (34)..(34): X is T or S
  MISC_FEATURE (35)..(35): X is A or G

SEQ ID NO: 379 - protein, 41 aa, Artificial
  Completely synthesized peptide construct
DLLKNGERIEKVEGGGGIGAVLKVLTTGPALISWIKRKRQQ

SEQ ID NO: 380 - protein, 41 aa, Artificial
  peptide construct
  MISC_FEATURE (1)..(1): X is D and E for acidic amino acids
  MISC_FEATURE (2)..(2): X is I, L or V
  MISC_FEATURE (3)..(3): X is I, L or V
  MISC_FEATURE (4)..(4): X is K, R or H for basic amino acids
  MISC_FEATURE (5)..(5): X is N or Q for amidated amino acids
  MISC_FEATURE (6)..(6): X is A or G
  MISC_FEATURE (7)..(7): X is D and E for acidic amino acids
  MISC_FEATURE (8)..(8): X is K, R or H for basic amino acids
  MISC_FEATURE (9)..(9): X is I, L or V
  MISC_FEATURE (10)..(10): X is D and E for acidic amino acids
  MISC_FEATURE (11)..(11): X is K, R or H for basic amino acids
  MISC_FEATURE (12)..(12): X is I, L or V
  MISC_FEATURE (13)..(13): X is D and E for acidic amino acids
  MISC_FEATURE (14)..(14): X is A or G
  MISC_FEATURE (15)..(15): X is A or G
  MISC_FEATURE (16)..(16): X is A or G
  MISC_FEATURE (17)..(17): X is A or G
  MISC_FEATURE (18)..(18): X is I, L or V
  MISC_FEATURE (19)..(19): X is A or G
  MISC_FEATURE (20)..(20): X is A or G
  MISC_FEATURE (21)..(21): X is I, L or V
  MISC_FEATURE (22)..(22): X is I, L or V
  MISC_FEATURE (23)..(23): X is K, R or H for basic amino acids
  MISC_FEATURE (24)..(24): X is I, L or V
  MISC_FEATURE (25)..(25): X is I, L or V
  MISC_FEATURE (26)..(26): X is T or S
  MISC_FEATURE (27)..(27): X is T or S
  MISC_FEATURE (28)..(28): X is A or G
  MISC_FEATURE (29)..(29): X is F or P
  MISC_FEATURE (30)..(30): X is A or G
  MISC_FEATURE (31)..(31): X is I, L or V
  MISC_FEATURE (32)..(32): X is I, L or V
  MISC_FEATURE (33)..(33): X is C or S
  MISC_FEATURE (34)..(34): X is F, W or Y for aromatic amino acids
  MISC_FEATURE (35)..(35): X is I, L or V
  MISC_FEATURE (36)..(36): X is K, R or H for basic amino acids
  MISC_FEATURE (37)..(37): X is K, R or H for basic amino acids
  MISC_FEATURE (38)..(38): X is K, R or H for basic amino acids
  MISC_FEATURE (39)..(39): X is K, R or H for basic amino acids
  MISC_FEATURE (40)..(40): X is N or Q for amidated amino acids
  MISC_FEATURE (41)..(41): X is N or Q for amidated amino acids
  MISC_FEATURE (41)..(41): X is N or Q for amidated amino acids
XXXXXXXXXXXXXXXXXXXXXXXXXXXXXXXXXXXXXXXXX

SEQ ID NO: 381 - protein, 56 aa, Artificial
  Completely synthesized peptide construct
DAEFRHDSGYEVHHQKLVFFAEDVGSNKGAIIGLMVGGVVGGGDLLKNGERIEKVE

SEQ ID NO: 382 - protein, 56 aa, Artificial; identical to SEQ ID NO: 302
  peptide construct
  MISC_FEATURE (1)..(1): X is D and E for acidic amino acids
  MISC_FEATURE (2)..(2): X is A or G
  MISC_FEATURE (3)..(3): X is D and  E for acidic amino acids
  MISC_FEATURE (4)..(4): X is F,  W or Y for aromatic amino acids
  MISC_FEATURE (5)..(5): X is K, R or H for basic amino acids
  MISC_FEATURE (6)..(6): X is K, R or H for basic amino acids
  MISC_FEATURE (7)..(7): X is D and E for acidic amino acids
  MISC_FEATURE (8)..(8): X is T or S
  MISC_FEATURE (9)..(9): X is A or G
  MISC_FEATURE (10)..(10): X is F, W or Y for aromatic amino acids
  MISC_FEATURE (11)..(11): X is D and E for acidic amino acids
  MISC_FEATURE (12)..(12): X is I, L or V
  MISC_FEATURE (13)..(13): X is K, R or H for basic amino acids
  MISC_FEATURE (14)..(14): X is K, R or H for basic amino acids
  MISC_FEATURE (15)..(15): X is N or Q for amidated amino acids
  MISC_FEATURE (16)..(16): X is K, R or H for basic amino acids
  MISC_FEATURE (17)..(17): X is I, L or V
  MISC_FEATURE (18)..(18): X is I, L or V
  MISC_FEATURE (19)..(19): X is F, W or Y for aromatic amino acids
  MISC_FEATURE (20)..(20): X is F, W or Y for aromatic amino acids
  MISC_FEATURE (21)..(21): X is A or G
  MISC_FEATURE (22)..(22): X is D and E for acidic amino acids
  MISC_FEATURE (23)..(23): X is D and E for acidic amino acids
  MISC_FEATURE (24)..(24): X is I, L or V
  MISC_FEATURE (25)..(25): X is A or G
  MISC_FEATURE (26)..(26): X is C or S
  MISC_FEATURE (27)..(27): X is N or Q for amidated amino acids
  MISC_FEATURE (28)..(28): X is K, R or H for basic amino acids
  MISC_FEATURE (29)..(29): X is A or G
  MISC_FEATURE (30)..(30): X is A or G
  MISC_FEATURE (31)..(31): X is I, L or V
  MISC_FEATURE (32)..(32): X is I, L or V
  MISC_FEATURE (33)..(33): X is A or G
  MISC_FEATURE (34)..(34): X is I, L or V
  MISC_FEATURE (35)..(35): X is M or Nle
  MISC_FEATURE (36)..(36): X is I, L or V
  MISC_FEATURE (37)..(37): X is A or G
  MISC_FEATURE (38)..(38): X is A or G
  MISC_FEATURE (39)..(39): X is I, L or V
  MISC_FEATURE (40)..(40): X is I, L or V
  MISC_FEATURE (41)..(41): X is A and G
  MISC_FEATURE (42)..(42): X is A and G
  MISC_FEATURE (43)..(43): X is A and G
  MISC_FEATURE (44)..(44): X is D and E for acidic amino acids
  MISC_FEATURE (45)..(45): X is I, L or V
  MISC_FEATURE (46)..(46): X is I, L or V
  MISC_FEATURE (47)..(47): X is K, R or H for basic amino acids
  MISC_FEATURE (48)..(48): X is N or Q for amidated amino acids
  MISC_FEATURE (49)..(49): X is A and G
  MISC_FEATURE (50)..(50): X is D and E for acidic amino acids
  MISC_FEATURE (51)..(51): X is K, R or H for basic amino acids
  MISC_FEATURE (52)..(52): X is I, L or V
  MISC_FEATURE (53)..(53): X is D and E for acidic amino acids
  MISC_FEATURE (54)..(54): X is K, R or H for basic amino acids
  MISC_FEATURE (55)..(55): X is I, L or V
  MISC_FEATURE (56)..(56): X is D and E for acidic amino acids

SEQ ID NO: 383 - protein, 43 aa, Artificial
  Completely synthesized peptide construct
DAEFRHDSGYEVHHQKLVFFAENVGSNKGGDLLKNGERIEKVE

SEQ ID NO: 384 - protein, 44 aa, Artificial; identical to SEQ ID NO: 304
  peptide construct
  MISC_FEATURE (1)..(1): X is D and E for acidic amino acids
  MISC_FEATURE (2)..(2): X is A or G
  MISC_FEATURE (3)..(3): X is D and E for acidic amino acids
  MISC_FEATURE (4)..(4): X is F, W or Y for aromatic amino acids
  MISC_FEATURE (5)..(5): X is K, R or H for basic amino acids
  MISC_FEATURE (6)..(6): X is K, R or H for basic amino acids
  MISC_FEATURE (7)..(7): X is D and E for acidic amino acids
  MISC_FEATURE (8)..(8): X is T or S
  MISC_FEATURE (9)..(9): X is A or G
  MISC_FEATURE (10)..(10): X is F, W or Y for aromatic amino acids
  MISC_FEATURE (11)..(11): X is A and G
  MISC_FEATURE (12)..(12): X is A and G
  MISC_FEATURE (13)..(13): X is A and G
  MISC_FEATURE (14)..(14): X is D and E for acidic amino acids
  MISC_FEATURE (15)..(15): X is I, L or V
  MISC_FEATURE (16)..(16): X is K, R or H for basic amino acids
  MISC_FEATURE (17)..(17): X is K, R or H for basic amino acids
  MISC_FEATURE (18)..(18): X is N or Q for amidated amino acids
  MISC_FEATURE (19)..(19): X is K, R or H for basic amino acids
  MISC_FEATURE (20)..(20): X is I, L or V
  MISC_FEATURE (21)..(21): X is I, L or V
  MISC_FEATURE (22)..(22): X is F, W or Y for aromatic amino acids
  MISC_FEATURE (23)..(23): X is F, W or Y for aromatic amino acids
  MISC_FEATURE (24)..(24): X is A and G
  MISC_FEATURE (25)..(25): X is D and E for acidic amino acids
  MISC_FEATURE (26)..(26): X is D and E for acidic amino acids
  MISC_FEATURE (27)..(27): X is I, L or V
  MISC_FEATURE (28)..(28): X is A and G
  MISC_FEATURE (29)..(29): X is C or S
  MISC_FEATURE (30)..(30): X is N or Q for amidated amino acids
  MISC_FEATURE (31)..(31): X is K, R or H for basic amino acids
  MISC_FEATURE (32)..(32): X is D and E for acidic amino acids
  MISC_FEATURE (33)..(33): X is I, L or V
  MISC_FEATURE (34)..(34): X is I, L or V
  MISC_FEATURE (35)..(35): X is K, R or H for basic amino acids
  MISC_FEATURE (36)..(36): X is N or Q for amidated amino acids
  MISC_FEATURE (37)..(37): X is A and G
  MISC_FEATURE (38)..(38): X is D and E for acidic amino acids
  MISC_FEATURE (39)..(39): X is K, R or H for basic amino acids
  MISC_FEATURE (40)..(40): X is I, L or V
  MISC_FEATURE (41)..(41): X is D and E for acidic amino acids
  MISC_FEATURE (42)..(42): X is K, R or H for basic amino acids
  MISC_FEATURE (43)..(43): X is I, L or V
  MISC_FEATURE (44)..(44): X is D and E for acidic amino acids

SEQ ID NO: 385 - protein, 46 aa, Artificial
  Completely synthesized peptide construct
DAEFRHDSGYEVHHQKLVFFAENVGSNKAIGGGDLLKNGERIEKVE

SEQ ID NO: 386 - protein, 46 aa, Artificial; identical to SEQ ID NO: 144
  peptide construct
  MISC_FEATURE (1)..(1): X is D and E for acidic amino acids
  MISC_FEATURE (2)..(2): X is A or G
  MISC_FEATURE (3)..(3): X is D and E for acidic amino acids
  MISC_FEATURE (4)..(4): X is F, W or Y for aromatic amino acids
  MISC_FEATURE (5)..(5): X is K, R or H for basic amino acids
  MISC_FEATURE (6)..(6): X is K, R or H for basic amino acids
  MISC_FEATURE (7)..(7): X is D and E for acidic amino acids
  MISC_FEATURE (8)..(8): X is T or S
  MISC_FEATURE (9)..(9): X is A or G
  MISC_FEATURE (10)..(10): X is F, W or Y for aromatic amino acids
  MISC_FEATURE (11)..(11): X is D and E for acidic amino acids
  MISC_FEATURE (12)..(12): X is I, L or V
  MISC_FEATURE (13)..(13): X is K, R or H for basic amino acids
  MISC_FEATURE (14)..(14): X is K, R or H for basic amino acids
  MISC_FEATURE (15)..(15): X is N or Q for amidated amino acids
  MISC_FEATURE (16)..(16): X is K,  R or H for basic amino acids
  MISC_FEATURE (17)..(17): X is I, L or V
  MISC_FEATURE (18)..(18): X is I, L or V
  MISC_FEATURE (19)..(19): X is F, W or Y for aromatic amino acids
  MISC_FEATURE (20)..(20): X is F, W or Y for aromatic amino acids
  MISC_FEATURE (21)..(21): X is A or G
  MISC_FEATURE (22)..(22): X is D and E for acidic amino acids
  MISC_FEATURE (23)..(23): X is D and E for acidic amino acids
  MISC_FEATURE (24)..(24): X is I, L or V
  MISC_FEATURE (25)..(25): X is A or G
  MISC_FEATURE (26)..(26): X is C or S
  MISC_FEATURE (27)..(27): X is N or Q for amidated amino acids
  MISC_FEATURE (28)..(28): X is K, R or H for basic amino acids
  MISC_FEATURE (29)..(29): X is A or G
  MISC_FEATURE (30)..(30): X is I, L or V
  MISC_FEATURE (31)..(31): X is A and G
  MISC_FEATURE (32)..(32): X is A and G
  MISC_FEATURE (33)..(33): X is A and G
  MISC_FEATURE (34)..(34): X is D and E for acidic amino acids
  MISC_FEATURE (35)..(35): X is I, L or V
  MISC_FEATURE (36)..(36): X is I, L or V
  MISC_FEATURE (37)..(37): X is K, R or H for basic amino acids
  MISC_FEATURE (38)..(38): X is N or Q for amidated amino acids
  MISC_FEATURE (39)..(39): X is A and G
  MISC_FEATURE (40)..(40): X is D and E for acidic amino acids
  MISC_FEATURE (41)..(41): X is K, R or H for basic amino acids
  MISC_FEATURE (42)..(42): X is I, L or V
  MISC_FEATURE (43)..(43): X is D and E for acidic amino acids
  MISC_FEATURE (44)..(44): X is K, R or H for basic amino acids
  MISC_FEATURE (45)..(45): X is I, L or V
  MISC_FEATURE (46)..(46): X is D and E for acidic amino acids

SEQ ID NO: 387 - protein, 27 aa, Artificial
  Completely synthesized peptide construct
DAEFRHDSGYEGGGDLLKNGERIEKVE

SEQ ID NO: 388 - protein, 27 aa, Artificial
  peptide construct
  MISC_FEATURE (1)..(1): X is D and E for acidic amino acids
  MISC_FEATURE (2)..(2): X is A or G
  MISC_FEATURE (3)..(3): X is D and E for acidic amino acids
  MISC_FEATURE (4)..(4): X is F, W or Y for aromatic amino acids
  MISC_FEATURE (5)..(5): X is K, R or H for basic amino acids
  MISC_FEATURE (6)..(6): X is K, R or H for basic amino acids
  MISC_FEATURE (7)..(7): X is D and E for acidic amino acids
  MISC_FEATURE (8)..(8): X is T or S
  MISC_FEATURE (9)..(9): X is A or G
  MISC_FEATURE (10)..(10): X is F, W or Y for aromatic amino acids
  MISC_FEATURE (11)..(11): X is D and E for acidic amino acids
  MISC_FEATURE (12)..(12): X is A and G
  MISC_FEATURE (13)..(13): X is A and G
  MISC_FEATURE (14)..(14): X is A and G
  MISC_FEATURE (15)..(15): X is D and E for acidic amino acids
  MISC_FEATURE (16)..(16): X is I, L or V
  MISC_FEATURE (17)..(17): X is I, L or V
  MISC_FEATURE (18)..(18): X is K, R or H for basic amino acids
  MISC_FEATURE (19)..(19): X is N or Q for amidated amino acids
  MISC_FEATURE (20)..(20): X is A and G
  MISC_FEATURE (21)..(21): X is D and E for acidic amino acids
  MISC_FEATURE (22)..(22): X is K, R or H for basic amino acids
  MISC_FEATURE (23)..(23): X is I, L or V
  MISC_FEATURE (24)..(24): X is D and E for acidic amino acids
  MISC_FEATURE (25)..(25): X is K, R or H for basic amino acids
  MISC_FEATURE (26)..(26): X is I, L or V
  MISC_FEATURE (27)..(27): X is D and E for acidic amino acids
XXXXXXXXXXXXXXXXXXXXXXXXXXX

SEQ ID NO: 389 - protein, 23 aa, Artificial
  Completely synthesized peptide construct
ENVGSNKGGGDLLKNGERIEKVE

SEQ ID NO: 390 - protein, 23 aa, Artificial
  peptide construct
  MISC_FEATURE (1)..(1): X is D and E for acidic amino acids
  MISC_FEATURE (2)..(2): X is D and E for acidic amino acids
  MISC_FEATURE (3)..(3): X is I, L or V
  MISC_FEATURE (4)..(4): X is A or G
  MISC_FEATURE (5)..(5): X is C or S
  MISC_FEATURE (6)..(6): X is N or Q for amidated amino acids
  MISC_FEATURE (7)..(7): X is K, R or H for basic amino acids
  MISC_FEATURE (8)..(8): X is A and G
  MISC_FEATURE (9)..(9): X is A and G
  MISC_FEATURE (10)..(10): X is A and G
  MISC_FEATURE (11)..(11): X is D and E for acidic amino acids
  MISC_FEATURE (12)..(12): X is I, L or V
  MISC_FEATURE (13)..(13): X is I, L or V
  MISC_FEATURE (14)..(14): X is K, R or H for basic amino acids
  MISC_FEATURE (15)..(15): X is N or Q for amidated amino acids
  MISC_FEATURE (16)..(16): X is A and G
  MISC_FEATURE (17)..(17): X is D and E for acidic amino acids
  MISC_FEATURE (18)..(18): X is K, R or H for basic amino acids
  MISC_FEATURE (19)..(19): X is I, L or V
  MISC_FEATURE (20)..(20): X is D and E for acidic amino acids
  MISC_FEATURE (21)..(21): X is K, R or H for basic amino acids
  MISC_FEATURE (22)..(22): X is I, L or V
  MISC_FEATURE (23)..(23): X is D and E for acidic amino acids
XXXXXXXXXXXXXXXXXXXXXXX

SEQ ID NO: 391 - protein, 28 aa, Artificial
  Completely synthesized peptide construct
DAEFRHDSGYEVGGGDLLKNGERIEKVE

SEQ ID NO: 392 - protein, 28 aa, Artificial
  peptide construct
  MISC_FEATURE (1)..(1): X is D and E for acidic amino acids
  MISC_FEATURE (2)..(2): X is A or G
  MISC_FEATURE (3)..(3): X is D and E for acidic amino acids
  MISC_FEATURE (4)..(4): X is F, W or Y for aromatic amino acids
  MISC_FEATURE (5)..(5): X is K, R or H for basic amino acids
  MISC_FEATURE (6)..(6): X is K, R or H for basic amino acids
  MISC_FEATURE (7)..(7): X is D and E for acidic amino acids
  MISC_FEATURE (8)..(8): X is T or S
  MISC_FEATURE (9)..(9): X is A or G
  MISC_FEATURE (10)..(10): X is F, W or Y for aromatic amino acids
  MISC_FEATURE (11)..(11): X is D and E for acidic amino acids
  MISC_FEATURE (12)..(12): X is I, L or V
  MISC_FEATURE (13)..(13): X is A and G
  MISC_FEATURE (14)..(14): X is A and G
  MISC_FEATURE (15)..(15): X is A and G
  MISC_FEATURE (16)..(16): X is D and E for acidic amino acids
  MISC_FEATURE (17)..(17): X is I, L or V
  MISC_FEATURE (18)..(18): X is I, L or V
  MISC_FEATURE (19)..(19): X is K, R or H for basic amino acids
  MISC_FEATURE (20)..(20): X is N or Q for amidated amino acids
  MISC_FEATURE (21)..(21): X is A and G
  MISC_FEATURE (22)..(22): X is D and E for acidic amino acids
  MISC_FEATURE (23)..(23): Xis K, R or H for basic amino acids
  MISC_FEATURE (24)..(24): X is I, L or V
  MISC_FEATURE (25)..(25): X is D and E for acidic amino acids
  MISC_FEATURE (26)..(26): X is K, R or H for basic amino acids
  MISC_FEATURE (27)..(27): X is I, L or V
  MISC_FEATURE (28)..(28): X is D and E for acidic amino acids
XXXXXXXXXXXXXXXXXXXXXXXXXXXX

SEQ ID NO: 393 - protein, 26 aa, Artificial
  Completely synthesized peptide construct
DAEFRHDSGYGGGDLLKNGERIEKVE

SEQ ID NO: 394 - protein, 26 aa, Artificial
  peptide construct
  MISC_FEATURE (1)..(1): X is D and E for acidic amino acids
  MISC_FEATURE (2)..(2): X is A or G
  MISC_FEATURE (3)..(3): X is D and E for acidic amino acids
  MISC_FEATURE (4)..(4): X is F, W or Y for aromatic amino acids
  MISC_FEATURE (5)..(5): X is K, R or H for basic amino acids
  MISC_FEATURE (6)..(6): X is K, R or H for basic amino acids
  MISC_FEATURE (7)..(7): X is D and E for acidic amino acids
  MISC_FEATURE (8)..(8): X is T or S
  MISC_FEATURE (9)..(9): X is A or G
  MISC_FEATURE (10)..(10): X is F,  W or Y for aromatic amino acids
  MISC_FEATURE (11)..(11): X is A and G
  MISC_FEATURE (12)..(12): X is A and G
  MISC_FEATURE (13)..(13): X is A and G
  MISC_FEATURE (14)..(14): X is D and E for acidic amino acids
  MISC_FEATURE (15)..(15): X is I, L or V
  MISC_FEATURE (16)..(16): X is I, L or V
  MISC_FEATURE (17)..(17): X is K, R or H for basic amino acids
  MISC_FEATURE (18)..(18): X is N or Q for amidated amino acids
  MISC_FEATURE (19)..(19): X is A and G
  MISC_FEATURE (20)..(20): X is D and E for acidic amino acids
  MISC_FEATURE (21)..(21): X is K, R or H for basic amino acids
  MISC_FEATURE (22)..(22): X is I, L or V
  MISC_FEATURE (23)..(23): X is D and E for acidic amino acids
  MISC_FEATURE (24)..(24): X is K, R or H for basic amino acids
  MISC_FEATURE (25)..(25): X is I, L or V
  MISC_FEATURE (26)..(26): X is D and E for acidic amino acids
XXXXXXXXXXXXXXXXXXXXXXXXXX

SEQ ID NO: 395 - protein, 20 aa, Artificial
  Completely synthesized peptide construct
EFRHGGGDLLKNGERIEKVE

SEQ ID NO: 396 - protein, 20 aa, Artificial
  peptide construct
  MISC_FEATURE (1)..(1): X is D and E for acidic amino acids
  MISC_FEATURE (2)..(2): X is F or P
  MISC_FEATURE (3)..(3): X is K, R or H for basic amino acids
  MISC_FEATURE (4)..(4): X is K, R or H for basic amino acids
  MISC_FEATURE (5)..(5): X is A and G
  MISC_FEATURE (6)..(6): X is A and G
  MISC_FEATURE (7)..(7): X is A and G
  MISC_FEATURE (8)..(8): X is D and E for acidic amino acids
  MISC_FEATURE (9)..(9): X is I, L or V
  MISC_FEATURE (10)..(10): X is I, L or V
  MISC_FEATURE (11)..(11): X is K, R or H for basic amino acids
  MISC_FEATURE (12)..(12): X is N or Q for amidated amino acids
  MISC_FEATURE (13)..(13): X is A and G
  MISC_FEATURE (14)..(14): X is D and E for acidic amino acids
  MISC_FEATURE (15)..(15): X is K, R or H for basic amino acids
  MISC_FEATURE (16)..(16): X is I, L or V
  MISC_FEATURE (17)..(17): X is D and E for acidic amino acids
  MISC_FEATURE (18)..(18): X is K, R or H for basic amino acids
  MISC_FEATURE (19)..(19): X is I, L or V
  MISC_FEATURE (20)..(20): X is D and E for acidic amino acids
XXXXXXXXXXXXXXXXXXXX

SEQ ID NO: 397 - protein, 35 aa, Artificial
  Completely synthesized peptide construct
DSAFDVLSFTAEEKAGVYKGGGDLLKNGERIEKVE

SEQ ID NO: 398 - protein, 35 aa, Artificial; identical to SEQ ID NO: 206
  peptide construct
  MISC_FEATURE (1)..(1): X is D and E for acidic amino acids
  MISC_FEATURE (2)..(2): X is C or S
  MISC_FEATURE (3)..(3): X is A or G
  MISC_FEATURE (4)..(4): X is F, W or Y for aromatic amino acids
  MISC_FEATURE (5)..(5): X is D and E for acidic amino acids
  MISC_FEATURE (6)..(6): X is I, L or V
  MISC_FEATURE (7)..(7): X is I, L or V
  MISC_FEATURE (8)..(8): X is C or S
  MISC_FEATURE (9)..(9): X is F, W or Y for aromatic amino acids
  MISC_FEATURE (10)..(10): X is T or S
  MISC_FEATURE (11)..(11): X is A or G
  MISC_FEATURE (12)..(12): X is D and E for acidic amino acids
  MISC_FEATURE (13)..(13): X is D and E for acidic amino acids
  MISC_FEATURE (14)..(14): X is K, R or H for basic amino acids
  MISC_FEATURE (15)..(15): X is A or G
  MISC_FEATURE (16)..(16): X is A or G
  MISC_FEATURE (17)..(17): X is I, L or V
  MISC_FEATURE (18)..(18): X is F, W or Y for aromatic amino acids
  MISC_FEATURE (19)..(19): X is K, R or H for basic amino acids
  MISC_FEATURE (20)..(20): X is A and G
  MISC_FEATURE (21)..(21): X is A and G
  MISC_FEATURE (22)..(22): X is A and G
  MISC_FEATURE (23)..(23): X is D and E for acidic amino acids
  MISC_FEATURE (24)..(24): X is I, L or V
  MISC_FEATURE (25)..(25): X is I, L or V
  MISC_FEATURE (26)..(26): X is K, R or H for basic amino acids
  MISC_FEATURE (27)..(27): X is N or Q for amidated amino acids
  MISC_FEATURE (28)..(28): X is A and G
  MISC_FEATURE (29)..(29): X is D and E for acidic amino acids
  MISC_FEATURE (30)..(30): X is K, R or H for basic amino acids
  MISC_FEATURE (31)..(31): X is I, L or V
  MISC_FEATURE (32)..(32): X is D and E for acidic amino acids
  MISC_FEATURE (33)..(33): X is K, R or H for basic amino acids
  MISC_FEATURE (34)..(34): X is I, L or V
  MISC_FEATURE (35)..(35): X is D and E for acidic amino acids

SEQ ID NO: 399 - protein, 30 aa, Artificial
  Completely synthesized peptide construct
SLKLMATLFSTYASGGGDLLKNGERIEKVE

SEQ ID NO: 400 - protein, 30 aa, Artificial; identical to SEQ ID NO: 58
  peptide construct
  MISC_FEATURE (1)..(1): X is C or S
  MISC_FEATURE (2)..(2): X is I, L or V
  MISC_FEATURE (3)..(3): X is K, R or H for basic amino acids
  MISC_FEATURE (4)..(4): X is I, L or V
  MISC_FEATURE (5)..(5): X is M or Nle
  MISC_FEATURE (6)..(6): X is A or G
  MISC_FEATURE (7)..(7): X is T or S
  MISC_FEATURE (8)..(8): X is I, L or V
  MISC_FEATURE (9)..(9): X is F or P
  MISC_FEATURE (10)..(10): X is C or S
  MISC_FEATURE (11)..(11): X is T or S
  MISC_FEATURE (12)..(12): X is F, W or Y for aromatic amino acids
  MISC_FEATURE (13)..(13): X is A or G
  MISC_FEATURE (14)..(14): X is C or S
  MISC_FEATURE (15)..(15): X is A and G
  MISC_FEATURE (16)..(16): X is A and G
  MISC_FEATURE (17)..(17): X is A and G
  MISC_FEATURE (18)..(18): X is D and E for acidic amino acids
  MISC_FEATURE (19)..(19): X is I, L or V
  MISC_FEATURE (20)..(20): X is I, L or V
  MISC_FEATURE (21)..(21): X is K, R or H for basic amino acids
  MISC_FEATURE (22)..(22): X is N or Q for amidated amino acids
  MISC_FEATURE (23)..(23): X is A and G
  MISC_FEATURE (24)..(24): X is D and E for acidic amino acids
  MISC_FEATURE (25)..(25): X is K, R or H for basic amino acids
  MISC_FEATURE (26)..(26): X is I, L or V
  MISC_FEATURE (27)..(27): X is D and E for acidic amino acids
  MISC_FEATURE (28)..(28): X is K, R or H for basic amino acids
  MISC_FEATURE (29)..(29): X is I, L or V
  MISC_FEATURE (30)..(30): X is D and E for acidic amino acids

SEQ ID NO: 401 - protein, 29 aa, Artificial
  Completely synthesized peptide construct
LKLMATLFSSYATGGGDLLKNGERIEKVE

SEQ ID NO: 402 - protein, 30 aa, Artificial; identical to SEQ ID NO: 58
  peptide construct
  MISC_FEATURE (1)..(1): X is C or S
  MISC_FEATURE (2)..(2): X is I, L or V
  MISC_FEATURE (3)..(3): X is K, R or  H for basic amino acids
  MISC_FEATURE (4)..(4): X is I, L or V
  MISC_FEATURE (5)..(5): X is M or Nle
  MISC_FEATURE (6)..(6): X is A or G
  MISC_FEATURE (7)..(7): X is T or S
  MISC_FEATURE (8)..(8): X is I, L or V
  MISC_FEATURE (9)..(9): X is F or P
  MISC_FEATURE (10)..(10): X is C or S
  MISC_FEATURE (11)..(11): X is C or S
  MISC_FEATURE (12)..(12): X is F, W or Y for aromatic amino acids
  MISC_FEATURE (13)..(13): X is A or G
  MISC_FEATURE (14)..(14): X is T or S
  MISC_FEATURE (15)..(15): X is A and G
  MISC_FEATURE (16)..(16): X is A and G
  MISC_FEATURE (17)..(17): X is A and G
  MISC_FEATURE (18)..(18): X is D and E for acidic amino acids
  MISC_FEATURE (19)..(19): X is I, L or V
  MISC_FEATURE (20)..(20): X is I, L or V
  MISC_FEATURE (21)..(21): X is K, R or H for basic amino acids
  MISC_FEATURE (22)..(22): X is N or Q for amidated amino acids
  MISC_FEATURE (23)..(23): X is A and G
  MISC_FEATURE (24)..(24): X is D and E for acidic amino acids
  MISC_FEATURE (25)..(25): X is K, R or H for basic amino acids
  MISC_FEATURE (26)..(26): X is I, L or V
  MISC_FEATURE (27)..(27): X is D and E for acidic amino acids
  MISC_FEATURE (28)..(28): X is K, R or H for basic amino acids
  MISC_FEATURE (29)..(29): X is I, L or V
  MISC_FEATURE (30)..(30): X is D and E for acidic amino acids

SEQ ID NO: 403 - protein, 27 aa, Artificial
  Completely synthesized peptide construct
NITEIADLTQKGGGDLLKNGERIEKVE

SEQ ID NO: 404 - protein, 27 aa, Artificial
  peptide construct
  MISC_FEATURE (1)..(1): X is N or Q for amidated amino acids
  MISC_FEATURE (2)..(2): X is I, L or V
  MISC_FEATURE (3)..(3): X is T or S
  MISC_FEATURE (4)..(4): X is D and E for acidic amino acids
  MISC_FEATURE (5)..(5): X is I, L or V
  MISC_FEATURE (6)..(6): X is A or G
  MISC_FEATURE (7)..(7): X is D and E for acidic amino acids
  MISC_FEATURE (8)..(8): X is I, L or V
  MISC_FEATURE (9)..(9): X is T or S
  MISC_FEATURE (10)..(10): X is N or Q for amidated amino acids
  MISC_FEATURE (11)..(11): X is K, R or H for basic amino acids
  MISC_FEATURE (12)..(12): X is A and G
  MISC_FEATURE (13)..(13): X is A and G
  MISC_FEATURE (14)..(14): X is A and G
  MISC_FEATURE (15)..(15): X is D and E for acidic amino acids
  MISC_FEATURE (16)..(16): X is I, L or V
  MISC_FEATURE (17)..(17): X is I, L or V
  MISC_FEATURE (18)..(18): X is K, R or H for basic amino acids
  MISC_FEATURE (19)..(19): X is N or Q for amidated amino acids
  MISC_FEATURE (20)..(20): X is A and G
  MISC_FEATURE (21)..(21): X is D and E for acidic amino acids
  MISC_FEATURE (22)..(22): X is K, R or H for basic amino acids
  MISC_FEATURE (23)..(23): X is I, L or V
  MISC_FEATURE (24)..(24): X is D and E for acidic amino acids
  MISC_FEATURE (25)..(25): X is K, R or H for basic amino acids
  MISC_FEATURE (26)..(26): X is I, L or V
  MISC_FEATURE (27)..(27): X is D and E for acidic amino acids
XXXXXXXXXXXXXXXXXXXXXXXXXXX

SEQ ID NO: 405 - protein, 56 aa, Artificial [sequence omitted]

SEQ ID NO: 406 - protein, 56 aa, Artificial; identical to SEQ ID NO: 302
  peptide construct
  MISC_FEATURE (1)..(1): X is N or Q for amidated amino acids
  MISC_FEATURE (2)..(2): X is M or Nle
  MISC_FEATURE (3)..(3): X is F, W or Y for aromatic amino acids
  MISC_FEATURE (4)..(4): X is A or G
  MISC_FEATURE (5)..(5): X is M or Nle
  MISC_FEATURE (6)..(6): X is M or Nle
  MISC_FEATURE (7)..(7): X is I, L or V
  MISC_FEATURE (8)..(8): X is A or G
  MISC_FEATURE (9)..(9): X is K, R or H for basic amino acids
  MISC_FEATURE (10)..(10): X is F, W or Y for aromatic amino acids
  MISC_FEATURE (11)..(11): X is K, R or H for basic amino acids
  MISC_FEATURE (12)..(12): X is M or Nle
  MISC_FEATURE (13)..(13): X is F, W or Y for aromatic amino acids
  MISC_FEATURE (14)..(14): X is F or P
  MISC_FEATURE (15)..(15): X is D and E for acidic amino acids
  MISC_FEATURE (16)..(16): X is I, L or V
  MISC_FEATURE (17)..(17): X is K, R or H for basic amino acids
  MISC_FEATURE (18)..(18): X is D and E for acidic amino acids
  MISC_FEATURE (19)..(19): X is K, R or H for basic amino acids
  MISC_FEATURE (20)..(20): X is A or G
  MISC_FEATURE (21)..(21): X is M or Nle
  MISC_FEATURE (22)..(22): X is A or G
  MISC_FEATURE (23)..(23): X is A or G
  MISC_FEATURE (24)..(24): X is I, L or V
  MISC_FEATURE (25)..(25): X is F or P
  MISC_FEATURE (26)..(26): X is K, R or H for basic amino acids
  MISC_FEATURE (27)..(27): X is I, L or V
  MISC_FEATURE (28)..(28): X is I, L or V
  MISC_FEATURE (29)..(29): X is A or G
  MISC_FEATURE (30)..(30): X is F, W or Y for aromatic amino acids
  MISC_FEATURE (31)..(31): X is T or S
  MISC_FEATURE (32)..(32): X is C or S
  MISC_FEATURE (33)..(33): X is D and E for acidic amino acids
  MISC_FEATURE (34)..(34): X is K, R or H for basic amino acids
  MISC_FEATURE (35)..(35): X is C or S
  MISC_FEATURE (36)..(36): X is K, R or H for basic amino acids
  MISC_FEATURE (37)..(37): X is F, W or Y for aromatic amino acids
  MISC_FEATURE (38)..(38): X is C or S
  MISC_FEATURE (39)..(39): X is I, L or V
  MISC_FEATURE (40)..(40): X is K, R or H for basic amino acids
  MISC_FEATURE (41)..(41): X is A and G
  MISC_FEATURE (42)..(42): X is A and G
  MISC_FEATURE (43)..(43): X is A and G
  MISC_FEATURE (44)..(44): X is D and E for acidic amino acids
  MISC_FEATURE (45)..(45): X is I, L or V
  MISC_FEATURE (46)..(46): X is I, L or V
  MISC_FEATURE (47)..(47): X is K, R or H for basic amino acids
  MISC_FEATURE (48)..(48): X is N or Q for amidated amino acids
  MISC_FEATURE (49)..(49): X is A and G
  MISC_FEATURE (50)..(50): X is D and E for acidic amino acids
  MISC_FEATURE (51)..(51): X is K, R or H for basic amino acids
  MISC_FEATURE (52)..(52): X is I, L or V
  MISC_FEATURE (53)..(53): X is D and  E for acidic amino acids
  MISC_FEATURE (54)..(54): X is K, R or H for basic amino acids
  MISC_FEATURE (55)..(55): X is I, L or V
  MISC_FEATURE (56)..(56): X is D and E for acidic amino acids

SEQ ID NO: 407 - protein, 50 aa, Artificial
  Completely synthesized peptide construct
IARFKMFPEVKEKGMAALPRLIAFTSEHSHFSLKGGGDLLKNGERIEKVE

SEQ ID NO: 408 - protein, 50 aa, Artificial; identical to SEQ ID NO: 328
  peptide construct
  MISC_FEATURE (1)..(1): X is I,  L or V
  MISC_FEATURE (2)..(2): X is A or G
  MISC_FEATURE (3)..(3): X is K, R or H for basic amino acids
  MISC_FEATURE (4)..(4): X is F, W or Y for aromatic amino acids
  MISC_FEATURE (5)..(5): X is K, R or H for basic amino acids
  MISC_FEATURE (6)..(6): X is M or Nle
  MISC_FEATURE (7)..(7): X is F, W or Y for aromatic amino acids
  MISC_FEATURE (8)..(8): X is F or P
  MISC_FEATURE (9)..(9): X is D and E for acidic amino acids
  MISC_FEATURE (10)..(10): X is I, L or V
  MISC_FEATURE (11)..(11): X is K, R or H for basic amino acids
  MISC_FEATURE (12)..(12): X is D and E for acidic amino acids
  MISC_FEATURE (13)..(13): X is K, R or H for basic amino acids
  MISC_FEATURE (14)..(14): X is A or G
  MISC_FEATURE (15)..(15): X is M or Nle
  MISC_FEATURE (16)..(16): X is A or G
  MISC_FEATURE (17)..(17): X is A or G
  MISC_FEATURE (18)..(18): X is I, L or V
  MISC_FEATURE (19)..(19): X is F or P
  MISC_FEATURE (20)..(20): X is K, R or H for basic amino acids
  MISC_FEATURE (21)..(21): X is I, L or V
  MISC_FEATURE (22)..(22): X is I, L or V
  MISC_FEATURE (23)..(23): X is A or G
  MISC_FEATURE (24)..(24): X is F, W or Y for aromatic amino acids
  MISC_FEATURE (25)..(25): X is T or S
  MISC_FEATURE (26)..(26): X is C or S
  MISC_FEATURE (27)..(27): X is D and E for acidic amino acids
  MISC_FEATURE (28)..(28): X is K, R or H for basic amino acids
  MISC_FEATURE (29)..(29): X is C or S
  MISC_FEATURE (30)..(30): X is K, R or H for basic amino acids
  MISC_FEATURE (31)..(31): X is F, W or Y for aromatic amino acids
  MISC_FEATURE (32)..(32): X is C or S
  MISC_FEATURE (33)..(33): X is I, L or V
  MISC_FEATURE (34)..(34): X is K, R or H for basic amino acids
  MISC_FEATURE (35)..(35): X is A and G
  MISC_FEATURE (36)..(36): X is A and G
  MISC_FEATURE (37)..(37): X is A and G
  MISC_FEATURE (38)..(38): X is D and E for acidic amino acids
  MISC_FEATURE (39)..(39): X is I, L or V
  MISC_FEATURE (40)..(40): X is I, L or V
  MISC_FEATURE (41)..(41): X is K, R or H for basic amino acids
  MISC_FEATURE (42)..(42): X is N or Q for amidated amino acids
  MISC_FEATURE (43)..(43): X is A and G
  MISC_FEATURE (44)..(44): X is D and E for acidic amino acids
  MISC_FEATURE (45)..(45): X is K, R or H for basic amino acids
  MISC_FEATURE (46)..(46): X is I, L or V
  MISC_FEATURE (47)..(47): X is D and E for acidic amino acids
  MISC_FEATURE (48)..(48): X is K, R or H for basic amino acids
  MISC_FEATURE (49)..(49): X is I, L or V
  MISC_FEATURE (50)..(50): X is D and E for acidic amino acids

SEQ ID NO: 409 - protein, 36 aa, Artificial
  Completely synthesized peptide construct
SRLSKVAPVIKARMMEYGTTGGGDLLKNGERIEKVE

SEQ ID NO: 410 - protein, 36 aa, Artificial; identical to SEQ ID NO: 172
  peptide construct
  MISC_FEATURE (1)..(1): X is C or S
  MISC_FEATURE (2)..(2): X is K, R or H for basic amino acids
  MISC_FEATURE (3)..(3): X is I, L or V
  MISC_FEATURE (4)..(4): X is C or S
  MISC_FEATURE (5)..(5): X is K, R or H for basic amino acids
  MISC_FEATURE (6)..(6): X is I, L or V
  MISC_FEATURE (7)..(7): X is A or G
  MISC_FEATURE (8)..(8): X is F or P
  MISC_FEATURE (9)..(9): X is I, L or V
  MISC_FEATURE (10)..(10): X is I, L or V
  MISC_FEATURE (11)..(11): X is K, R or H for basic amino acids
  MISC_FEATURE (12)..(12): X is A or G
  MISC_FEATURE (13)..(13): X is K, R or H for basic amino acids
  MISC_FEATURE (14)..(14): X is M or Nle
  MISC_FEATURE (15)..(15): X is M or Nle
  MISC_FEATURE (16)..(16): X is D and E for acidic amino acids
  MISC_FEATURE (17)..(17): X is F, W or Y for aromatic amino acids
  MISC_FEATURE (18)..(18): X is A or G
  MISC_FEATURE (19)..(19): X is T or S
  MISC_FEATURE (20)..(20): X is T or S
  MISC_FEATURE (21)..(21): X is A and G
  MISC_FEATURE (22)..(22): X is A and G
  MISC_FEATURE (23)..(23): X is A and G
  MISC_FEATURE (24)..(24): X is D and E for acidic amino acids
  MISC_FEATURE (25)..(25): X is I, L or V
  MISC_FEATURE (26)..(26): X is I, L or V
  MISC_FEATURE (27)..(27): X is K, R or H for basic amino acids
  MISC_FEATURE (28)..(28): X is N or Q for amidated amino acids
  MISC_FEATURE (29)..(29): X is A and G
  MISC_FEATURE (30)..(30): X is D and E for acidic amino acids
  MISC_FEATURE (31)..(31): X is K, R or H for basic amino acids
  MISC_FEATURE (32)..(32): X is I, L or V
  MISC_FEATURE (33)..(33): X is D and E for acidic amino acids
  MISC_FEATURE (34)..(34): X is K, R or H for basic amino acids
  MISC_FEATURE (35)..(35): X is I, L or V
  MISC_FEATURE (36)..(36): X is D and E for acidic amino acids

SEQ ID NO: 411 - protein, 35 aa, Artificial
  Completely synthesized peptide construct
IPPSLRYLEDEERMSRLSKGGGDLLKNGERIEKVE

SEQ ID NO: 412 - protein, 34 aa, Artificial; identical to SEQ ID NO: 79
  peptide construct
  MISC_FEATURE (1)..(1): X is I, L or V
  MISC_FEATURE (2)..(2): X is F or P
  MISC_FEATURE (3)..(3): X is F or P
  MISC_FEATURE (4)..(4): X is C or S
  MISC_FEATURE (5)..(5): X is I, L or V
  MISC_FEATURE (6)..(6): X is K, R or H for basic amino acids
  MISC_FEATURE (7)..(7): X is F, W or Y for aromatic amino acids
  MISC_FEATURE (8)..(8): X is D and E for acidic amino acids
  MISC_FEATURE (9)..(9): X is D and E for acidic amino acids
  MISC_FEATURE (10)..(10): X is D and E for acidic amino acids
  MISC_FEATURE (11)..(11): X is D and E for acidic amino acids
  MISC_FEATURE (12)..(12): X is K, R or H for basic amino acids
  MISC_FEATURE (13)..(13): X is M or Nle
  MISC_FEATURE (14)..(14): X is C or S
  MISC_FEATURE (15)..(15): X is K, R or H for basic amino acids
  MISC_FEATURE (16)..(16): X is I, L or V
  MISC_FEATURE (17)..(17): X is C or S
  MISC_FEATURE (18)..(18): X is K, R or H for basic amino acids
  MISC_FEATURE (19)..(19): X is A and G
  MISC_FEATURE (20)..(20): X is A and G
  MISC_FEATURE (21)..(21): X is A and G
  MISC_FEATURE (22)..(22): X is D and E for acidic amino acids
  MISC_FEATURE (23)..(23): X is I, L or V
  MISC_FEATURE (24)..(24): X is I, L or V
  MISC_FEATURE (25)..(25): X is K, R or H for basic amino acids
  MISC_FEATURE (26)..(26): X is N or Q for amidated amino acids
  MISC_FEATURE (27)..(27): X is A and G
  MISC_FEATURE (28)..(28): X is D and E for acidic amino acids
  MISC_FEATURE (29)..(29): X is K, R or H for basic amino acids
  MISC_FEATURE (30)..(30): X is I, L or V
  MISC_FEATURE (31)..(31): X is D and E for acidic amino acids
  MISC_FEATURE (32)..(32): X is K, R or H for basic amino acids
  MISC_FEATURE (33)..(33): X is I, L or V
  MISC_FEATURE (34)..(34): X is D and E for acidic amino acids

SEQ ID NO: 413 - protein, 36 aa, Artificial
  Completely synthesized peptide construct
NTNMFTYEIAPVFVLLEYVTGGGDLLKNGERIEKVE

SEQ ID NO: 414 - protein, 36 aa, Artificial; identical to SEQ ID NO: 172
  peptide construct
  MISC_FEATURE (1)..(1): X is N or Q for aromatic amino acids
  MISC_FEATURE (2)..(2): X is T or S
  MISC_FEATURE (3)..(3): X is N or Q for aromatic amino acids
  MISC_FEATURE (4)..(4): X is M or Nle
  MISC_FEATURE (5)..(5): X is F, W or Y for aromatic amino acids
  MISC_FEATURE (6)..(6): X is T or S
  MISC_FEATURE (7)..(7): X is F, W or  Y for aromatic amino acids
  MISC_FEATURE (8)..(8): X is D and E for acidic amino acids
  MISC_FEATURE (9)..(9): X is I, L or V
  MISC_FEATURE (10)..(10): X is A or G
  MISC_FEATURE (11)..(11): X is F or P
  MISC_FEATURE (12)..(12): X is I, L or V
  MISC_FEATURE (13)..(13): X is F, W or Y for aromatic amino acids
  MISC_FEATURE (14)..(14): X is I, L or V
  MISC_FEATURE (15)..(15): X is I, L or V
  MISC_FEATURE (16)..(16): X is I, L or V
  MISC_FEATURE (17)..(17): X is D and E for acidic amino acids
  MISC_FEATURE (18)..(18): X is F, W or Y for aromatic amino acids
  MISC_FEATURE (19)..(19): X is I, L or V
  MISC_FEATURE (20)..(20): X is T or S
  MISC_FEATURE (21)..(21): X is A and G
  MISC_FEATURE (22)..(22): X is A and G
  MISC_FEATURE (23)..(23): X is A and G
  MISC_FEATURE (24)..(24): X is D and E for acidic amino acids
  MISC_FEATURE (25)..(25): X is I, L or V
  MISC_FEATURE (26)..(26): X is I, L or V
  MISC_FEATURE (27)..(27): X is K, R or H for basic amino acids
  MISC_FEATURE (28)..(28): X is N or Q for amidated amino acids
  MISC_FEATURE (29)..(29): X is A and G
  MISC_FEATURE (30)..(30): X is D and E for acidic amino acids
  MISC_FEATURE (31)..(31): X is K, R or H for basic amino acids
  MISC_FEATURE (32)..(32): X is I, L or V
  MISC_FEATURE (33)..(33): X is D and E for acidic amino acids
  MISC_FEATURE (34)..(34): X is K, R or H for basic amino acids
  MISC_FEATURE (35)..(35): X is I, L or V
  MISC_FEATURE (36)..(36): X is D and E for acidic amino acids

SEQ ID NO: 415 - protein, 31 aa, Artificial
  Completely synthesized peptide construct
FKADEKKFWGKYLYEGGGDLLKNGERIEKVE

SEQ ID NO: 416 - protein, 31 aa, Artificial; identical to SEQ ID NO: 130
  peptide construct
  MISC_FEATURE (1)..(1): X is F, W or  Y for aromatic amino acids
  MISC_FEATURE (2)..(2): X is K, R or H for basic amino acids
  MISC_FEATURE (3)..(3): X is A or G
  MISC_FEATURE (4)..(4): X is D and E for acidic amino acids
  MISC_FEATURE (5)..(5): X is D and E for acidic amino acids
  MISC_FEATURE (6)..(6): X is K, R or H for basic amino acids
  MISC_FEATURE (7)..(7): X is K, R or H for basic amino acids
  MISC_FEATURE (8)..(8): X is F, W or Y for aromatic amino acids
  MISC_FEATURE (9)..(9): X is F, W or Y for aromatic amino acids
  MISC_FEATURE (10)..(10): X is A or G
  MISC_FEATURE (11)..(11): X is K, R or H for basic amino acids
  MISC_FEATURE (12)..(12): X is F, W or Y for aromatic amino acids
  MISC_FEATURE (13)..(13): X is I, L or V
  MISC_FEATURE (14)..(14): X is F, W or Y for aromatic amino acids
  MISC_FEATURE (15)..(15): X is D and E for acidic amino acids
  MISC_FEATURE (16)..(16): X is A and G
  MISC_FEATURE (17)..(17): X is A and G
  MISC_FEATURE (18)..(18): X is A and G
  MISC_FEATURE (19)..(19): X is D and E for acidic amino acids
  MISC_FEATURE (20)..(20): X is I, L or V
  MISC_FEATURE (21)..(21): X is I, L or V
  MISC_FEATURE (22)..(22): X is K, R or H for basic amino acids
  MISC_FEATURE (23)..(23): X is N or Q for amidated amino acids
  MISC_FEATURE (24)..(24): X is A and G
  MISC_FEATURE (25)..(25): X is D and E for acidic amino acids
  MISC_FEATURE (26)..(26): X is K, R or H for basic amino acids
  MISC_FEATURE (27)..(27): X is I, L or V
  MISC_FEATURE (28)..(28): X is D and E for acidic amino acids
  MISC_FEATURE (29)..(29): X is K, R or H for basic amino acids
  MISC_FEATURE (30)..(30): X is I, L or V
  MISC_FEATURE (31)..(31): X is D and E for acidic amino acids

SEQ ID NO: 417 - protein, 31 aa, Artificial
  Completely synthesized peptide construct
SHLVEALYLVCGERGGGGDLLKNGERIEKVE

SEQ ID NO: 418 - protein, 30 aa, Artificial; identical to SEQ ID NO: 58
  peptide construct
  MISC_FEATURE (1)..(1): X is C or S
  MISC_FEATURE (2)..(2): X is K, R or H for basic amino acids
  MISC_FEATURE (3)..(3): X is I, L or V
  MISC_FEATURE (4)..(4): X is I, L or V
  MISC_FEATURE (5)..(5): X is D and  E for acidic amino acids
  MISC_FEATURE (6)..(6): X is A or G
  MISC_FEATURE (7)..(7): X is I, L or V
  MISC_FEATURE (8)..(8): X is F, W or Y for aromatic amino acids
  MISC_FEATURE (9)..(9): X is I, L or V
  MISC_FEATURE (10)..(10): X is C or S
  MISC_FEATURE (11)..(11): X is A or G
  MISC_FEATURE (12)..(12): X is D and E for acidic amino acids
  MISC_FEATURE (13)..(13): X is K, R or H for basic amino acids
  MISC_FEATURE (14)..(14): X is A or G
  MISC_FEATURE (15)..(15): X is A and G
  MISC_FEATURE (16)..(16): X is A and G
  MISC_FEATURE (17)..(17): X is A and G
  MISC_FEATURE (18)..(18): X is D and E for acidic amino acids
  MISC_FEATURE (19)..(19): X is I, L or V
  MISC_FEATURE (20)..(20): X is I, L or V
  MISC_FEATURE (21)..(21): X is K, R or H for basic amino acids
  MISC_FEATURE (22)..(22): X is N or Q for amidated amino acids
  MISC_FEATURE (23)..(23): X is A and G
  MISC_FEATURE (24)..(24): X is D and E for acidic amino acids
  MISC_FEATURE (25)..(25): X is K, R or H for basic amino acids
  MISC_FEATURE (26)..(26): X is I, L or V
  MISC_FEATURE (27)..(27): X is D and E for acidic amino acids
  MISC_FEATURE (28)..(28): X is K, R or H for basic amino acids
  MISC_FEATURE (29)..(29): X is I, L or V
  MISC_FEATURE (30)..(30): X is D and E for acidic amino acids

SEQ ID NO: 419 - protein, 40 aa, Artificial
  Completely synthesized peptide construct
VLGGGCALLRCIPALDSLTPANEDGGGDLLKNGERIEKVE

SEQ ID NO: 420 - protein, 40 aa, Artificial; identical to SEQ ID NO: 54
  peptide construct
  MISC_FEATURE (1)..(1): X is I, L or V
  MISC_FEATURE (2)..(2): X is I, L or V
  MISC_FEATURE (3)..(3): X is A or G
  MISC_FEATURE (4)..(4): X is A or G
  MISC_FEATURE (5)..(5): X is A or G
  MISC_FEATURE (6)..(6): X is C or S
  MISC_FEATURE (7)..(7): X is A or G
  MISC_FEATURE (8)..(8): X is I, L or V
  MISC_FEATURE (9)..(9): X is I, L or V
  MISC_FEATURE (10)..(10): X is K, R or H for basic amino acids
  MISC_FEATURE (11)..(11): X is C or S
  MISC_FEATURE (12)..(12): X is I, L or V
  MISC_FEATURE (13)..(13): X is F or P
  MISC_FEATURE (14)..(14): X is A or G
  MISC_FEATURE (15)..(15): X is I, L or V
  MISC_FEATURE (16)..(16): X is D and E for acidic amino acids
  MISC_FEATURE (17)..(17): X is C or S
  MISC_FEATURE (18)..(18): X is I, L or V
  MISC_FEATURE (19)..(19): X is T or S
  MISC_FEATURE (20)..(20): X is F or P
  MISC_FEATURE (21)..(21): X is A or G
  MISC_FEATURE (22)..(22): X is N or Q for amidated amino acids
  MISC_FEATURE (23)..(23): X is D and E for acidic amino acids
  MISC_FEATURE (24)..(24): X is D and E for acidic amino acids
  MISC_FEATURE (25)..(25): X is A and G
  MISC_FEATURE (26)..(26): X is A and G
  MISC_FEATURE (27)..(27): X is A and G
  MISC_FEATURE (28)..(28): X is D and E for acidic amino acids
  MISC_FEATURE (29)..(29): X is I, L or V
  MISC_FEATURE (30)..(30): X is I, L or V
  MISC_FEATURE (31)..(31): X is K, R or H for basic amino acids
  MISC_FEATURE (32)..(32): X is N or Q for amidated amino acids
  MISC_FEATURE (33)..(33): X is A and G
  MISC_FEATURE (34)..(34): X is D and E for acidic amino acids
  MISC_FEATURE (35)..(35): X is K, R or H for basic amino acids
  MISC_FEATURE (36)..(36): X is I, L or V
  MISC_FEATURE (37)..(37): X is D and E for acidic amino acids
  MISC_FEATURE (38)..(38): X is K, R or H for basic amino acids
  MISC_FEATURE (39)..(39): X is I, L or V
  MISC_FEATURE (40)..(40): X is D and E for acidic amino acids

SEQ ID NO: 421 - protein, 44 aa, Artificial
  Completely synthesized peptide construct
EACVTSWLWSGEGAVFYRVDLHFINLGTGGGDLLKNGERIEKVE

SEQ ID NO: 422 - protein, 44 aa, Artificial; identical to SEQ ID NO: 304
  peptide construct
  MISC_FEATURE (1)..(1): X is D and E for acidic amino acids
  MISC_FEATURE (2)..(2): X is A or G
  MISC_FEATURE (3)..(3): X is C or S
  MISC_FEATURE (4)..(4): X is I, L or V
  MISC_FEATURE (5)..(5): X is T or S
  MISC_FEATURE (6)..(6): X is C or S
  MISC_FEATURE (7)..(7): X is F, W or Y for aromatic amino acids
  MISC_FEATURE (8)..(8): X is I, L or V
  MISC_FEATURE (9)..(9): X is F, W or Y for aromatic amino acids
  MISC_FEATURE (10)..(10): X is C or S
  MISC_FEATURE (11)..(11): X is A or G
  MISC_FEATURE (12)..(12): X is D and E for acidic amino acids
  MISC_FEATURE (13)..(13): X is A or G
  MISC_FEATURE (14)..(14): X is A or G
  MISC_FEATURE (15)..(15): X is I, L or V
  MISC_FEATURE (16)..(16): X is F, W or Y for aromatic amino acids
  MISC_FEATURE (17)..(17): X is F, W or Y for aromatic amino acids
  MISC_FEATURE (18)..(18): X is K, R or H for basic amino acids
  MISC_FEATURE (19)..(19): X is I, L or V
  MISC_FEATURE (20)..(20): X is D and E for acidic amino acids
  MISC_FEATURE (21)..(21): X is I, L or V
  MISC_FEATURE (22)..(22): X is K, R or H for basic amino acids
  MISC_FEATURE (23)..(23): X is F, W or Y for aromatic amino acids
  MISC_FEATURE (24)..(24): X is I, L or V
  MISC_FEATURE (25)..(25): X is N or Q for amidated amino acids
  MISC_FEATURE (26)..(26): X is I, L or V
  MISC_FEATURE (27)..(27): X is A or G
  MISC_FEATURE (28)..(28): X is T or S
  MISC_FEATURE (29)..(29): X is A and G
  MISC_FEATURE (30)..(30): X is A and G
  MISC_FEATURE (31)..(31): X is A and G
  MISC_FEATURE (32)..(32): X is D and E for acidic amino acids
  MISC_FEATURE (33)..(33): X is I, L or V
  MISC_FEATURE (34)..(34): X is I, L or V
  MISC_FEATURE (35)..(35): X is K, R or H for basic amino acids
  MISC_FEATURE (36)..(36): X is N or Q for amidated amino acids
  MISC_FEATURE (37)..(37): X is A and G
  MISC_FEATURE (38)..(38): X is D and  E for acidic amino acids
  MISC_FEATURE (39)..(39): X is K, R or H for basic amino acids
  MISC_FEATURE (40)..(40): X is I, L or V
  MISC_FEATURE (41)..(41): X is D and E for acidic amino acids
  MISC_FEATURE (42)..(42): X is K, R or H for basic amino acids
  MISC_FEATURE (43)..(43): X is I, L or V
  MISC_FEATURE (44)..(44): X is D and E for acidic amino acids

SEQ ID NO: 423 - protein, 37 aa, Artificial
  Completely synthesized peptide construct
MDFWCVEHDRPPPATPTSLTTGGGDLLKNGERIEKVE

SEQ ID NO: 424 - protein, 37 aa, Artificial; identical to SEQ ID NO: 158
  peptide construct
  MISC_FEATURE (1)..(1): X is M or Nle
  MISC_FEATURE (2)..(2): X is D and E for acidic amino acids
  MISC_FEATURE (3)..(3): X is F, W or Y for aromatic amino acids
  MISC_FEATURE (4)..(4): X is F, W or Y for aromatic amino acids
  MISC_FEATURE (5)..(5): X is C or S
  MISC_FEATURE (6)..(6): X is I, L or V
  MISC_FEATURE (7)..(7): X is D and E for acidic amino acids
  MISC_FEATURE (8)..(8): X is K, R or H for basic amino acids
  MISC_FEATURE (9)..(9): X is D and E for acidic amino acids
  MISC_FEATURE (10)..(10): X is K, R or H for basic amino acids
  MISC_FEATURE (11)..(11): X is F or P
  MISC_FEATURE (12)..(12): X is F or P
  MISC_FEATURE (13)..(13): X is F or P
  MISC_FEATURE (14)..(14): X is A or G
  MISC_FEATURE (15)..(15): X is T or S
  MISC_FEATURE (16)..(16): X is F or P
  MISC_FEATURE (17)..(17): X is T or S
  MISC_FEATURE (18)..(18): X is C or S
  MISC_FEATURE (19)..(19): X is I, L or V
  MISC_FEATURE (20)..(20): X is T or S
  MISC_FEATURE (21)..(21): X is T or S
  MISC_FEATURE (22)..(22): X is A and G
  MISC_FEATURE (23)..(23): X is A and G
  MISC_FEATURE (24)..(24): X is A and G
  MISC_FEATURE (25)..(25): X is D and E for acidic amino acids
  MISC_FEATURE (26)..(26): X is I, L or V
  MISC_FEATURE (27)..(27): X is I, L or V
  MISC_FEATURE (28)..(28): X is K, R or H for basic amino acids
  MISC_FEATURE (29)..(29): X is  N or Q for amidated amino acids
  MISC_FEATURE (30)..(30): X is A and G
  MISC_FEATURE (31)..(31): X is D and E for acidic amino acids
  MISC_FEATURE (32)..(32): X is K, R or H for basic amino acids
  MISC_FEATURE (33)..(33): X is I, L or V
  MISC_FEATURE (34)..(34): X is D and E for acidic amino acids
  MISC_FEATURE (35)..(35): X is K, R or H for basic amino acids
  MISC_FEATURE (36)..(36): X is I, L or V
  MISC_FEATURE (37)..(37): X is D and E for acidic amino acids

SEQ ID NO: 425 - protein, 36 aa, Artificial
  Completely synthesized peptide construct
NMYAMMIARFKMFPEVKEKGGGGDLLKNGERIEKVE

SEQ ID NO: 426 - protein, 36 aa, Artificial; identical to SEQ ID NO: 172
  peptide construct
  MISC_FEATURE (1)..(1): X is N or Q for amidated amino acids
  MISC_FEATURE (2)..(2): X is M or Nle
  MISC_FEATURE (3)..(3): X is F, W or Y for aromatic amino acids
  MISC_FEATURE (4)..(4): X is A or G
  MISC_FEATURE (5)..(5): X is M or Nle
  MISC_FEATURE (6)..(6): X is M or Nle
  MISC_FEATURE (7)..(7): X is I, L or V
  MISC_FEATURE (8)..(8): X is A or G
  MISC_FEATURE (9)..(9): X is K, R or H for basic amino acids
  MISC_FEATURE (10)..(10): X is F, W or Y for aromatic amino acids
  MISC_FEATURE (11)..(11): X is K,  R or H for basic amino acids
  MISC_FEATURE (12)..(12): X is M or Nle
  MISC_FEATURE (13)..(13): X is F, W or Y for aromatic amino acids
  MISC_FEATURE (14)..(14): X is F or P
  MISC_FEATURE (15)..(15): X is D and E for acidic amino acids
  MISC_FEATURE (16)..(16): X is I, L or V
  MISC_FEATURE (17)..(17): X is K, R or H for basic amino acids
  MISC_FEATURE (18)..(18): X is D and E for acidic amino acids
  MISC_FEATURE (19)..(19): X is K, R or H for basic amino acids
  MISC_FEATURE (20)..(20): X is A or G
  MISC_FEATURE (21)..(21): X is A and G
  MISC_FEATURE (22)..(22): X is A and G
  MISC_FEATURE (23)..(23): X is A and G
  MISC_FEATURE (24)..(24): X is D and E for acidic amino acids
  MISC_FEATURE (25)..(25): X is I, L or V
  MISC_FEATURE (26)..(26): X is I, L or V
  MISC_FEATURE (27)..(27): X is K, R or H for basic amino acids
  MISC_FEATURE (28)..(28): X is N or Q for amidated amino acids
  MISC_FEATURE (29)..(29): X is A and G
  MISC_FEATURE (30)..(30): X is D and E for acidic amino acids
  MISC_FEATURE (31)..(31): X is K, R or H for basic amino acids
  MISC_FEATURE (32)..(32): X is I, L or V
  MISC_FEATURE (33)..(33): X is D and E for acidic amino acids
  MISC_FEATURE (34)..(34): X is K, R or H for basic amino acids
  MISC_FEATURE (35)..(35): X is D and E for acidic amino acids
  MISC_FEATURE (36)..(36): X is I, L or V

SEQ ID NO: 427 - protein, 49 aa, Artificial
  Completely synthesized peptide construct
NMYAMMIARFKMFPEVKEKGMAALPRLIAFTSEGGGDLLKNGERIEKVE

SEQ ID NO: 428 - protein, 49 aa, Artificial; identical to SEQ ID NO: 348
  peptide construct
  MISC_FEATURE (1)..(1): X is N or Q for amidated amino acids
  MISC_FEATURE (2)..(2): X is M or Nle
  MISC_FEATURE (3)..(3): X is F, W or Y for aromatic amino acids
  MISC_FEATURE (4)..(4): X is A or G
  MISC_FEATURE (5)..(5): X is M or Nle
  MISC_FEATURE (6)..(6): X is M or Nle
  MISC_FEATURE (7)..(7): X is I, L or V
  MISC_FEATURE (8)..(8): X is A or G
  MISC_FEATURE (9)..(9): X is K, R or H for basic amino acids
  MISC_FEATURE (10)..(10): X is F, W or Y for aromatic amino acids
  MISC_FEATURE (11)..(11): X is K, R or H for basic amino acids
  MISC_FEATURE (12)..(12): X is M or Nle
  MISC_FEATURE (13)..(13): X is F, W or Y for aromatic amino acids
  MISC_FEATURE (14)..(14): X is F or P
  MISC_FEATURE (15)..(15): X is D and E for acidic amino acids
  MISC_FEATURE (16)..(16): X is I, L or V
  MISC_FEATURE (17)..(17): X is K, R or H for basic amino acids
  MISC_FEATURE (18)..(18): X is D and E for acidic amino acids
  MISC_FEATURE (19)..(19): X is K, R or H for basic amino acids
  MISC_FEATURE (20)..(20): X is A or G
  MISC_FEATURE (21)..(21): X is M or Nle
  MISC_FEATURE (22)..(22): X is A or G
  MISC_FEATURE (23)..(23): X is A or G
  MISC_FEATURE (24)..(24): X is I, L or V
  MISC_FEATURE (25)..(25): X is F or P
  MISC_FEATURE (26)..(26): X is K, R or H for basic amino acids
  MISC_FEATURE (27)..(27): X is I, L or V
  MISC_FEATURE (28)..(28): X is I, L or V
  MISC_FEATURE (29)..(29): X is A or G
  MISC_FEATURE (30)..(30): X is F, W or Y for aromatic amino acids
  MISC_FEATURE (31)..(31): X is T or S
  MISC_FEATURE (32)..(32): X is C or S
  MISC_FEATURE (33)..(33): X is D and E for acidic amino acids
  MISC_FEATURE (34)..(34): X is A and G
  MISC_FEATURE (35)..(35): X is A and G
  MISC_FEATURE (36)..(36): X is A and G
  MISC_FEATURE (37)..(37): X is D and E for acidic amino acids
  MISC_FEATURE (38)..(38): X is I, L or V
  MISC_FEATURE (39)..(39): X is I, L or V
  MISC_FEATURE (40)..(40): X is K, R or H for basic amino acids
  MISC_FEATURE (41)..(41): X is N or Q for amidated amino acids
  MISC_FEATURE (42)..(42): X is A and G
  MISC_FEATURE (43)..(43): X is D and E for acidic amino acids
  MISC_FEATURE (44)..(44): X is K, R or H for basic amino acids
  MISC_FEATURE (45)..(45): X is I, L or V
  MISC_FEATURE (46)..(46): X is D and E for acidic amino acids
  MISC_FEATURE (47)..(47): X is K, R or H for basic amino acids
  MISC_FEATURE (48)..(48): X is I, L or V
  MISC_FEATURE (49)..(49): X is D and E for acidic amino acids

SEQ ID NO: 429 - protein, 29 aa, Artificial
  Completely synthesized peptide construct
IAFTSEHSHFSLKGGGDLLKNGERIEKVE

SEQ ID NO: 430 - protein, 29 aa, Artificial
  peptide construct
  MISC_FEATURE (1)..(1): X is I, L or V
  MISC_FEATURE (2)..(2): X is A or G
  MISC_FEATURE (3)..(3): X is F, W or Y for aromatic amino acids
  MISC_FEATURE (4)..(4): X is T or S
  MISC_FEATURE (5)..(5): X is C or S
  MISC_FEATURE (6)..(6): X is D and E for acidic amino acids
  MISC_FEATURE (7)..(7): X is K, R or H for basic amino acids
  MISC_FEATURE (8)..(8): X is C or S
  MISC_FEATURE (9)..(9): X is K, R or H for basic amino acids
  MISC_FEATURE (10)..(10): X is F, W or Y for aromatic amino acids
  MISC_FEATURE (11)..(11): X is C or S
  MISC_FEATURE (12)..(12): X is I, L or V
  MISC_FEATURE (13)..(13): X is K, R or H for basic amino acids
  MISC_FEATURE (14)..(14): X is A and G
  MISC_FEATURE (15)..(15): X is A and G
  MISC_FEATURE (16)..(16): X is A and G
  MISC_FEATURE (17)..(17): X is D and E for acidic amino acids
  MISC_FEATURE (18)..(18): X is I, L or V
  MISC_FEATURE (19)..(19): X is I, L or V
  MISC_FEATURE (20)..(20): X is K, R or H for basic amino acids
  MISC_FEATURE (21)..(21): X is N or Q for amidated amino acids
  MISC_FEATURE (22)..(22): X is A and G
  MISC_FEATURE (23)..(23): X is D and E for acidic amino acids
  MISC_FEATURE (24)..(24): X is K, R or H for basic amino acids
  MISC_FEATURE (25)..(25): X is I, L or V
  MISC_FEATURE (26)..(26): X is D and E for acidic amino acids
  MISC_FEATURE (27)..(27): X is K, R or H for basic amino acids
  MISC_FEATURE (28)..(28): X is I, L or V
  MISC_FEATURE (29)..(29): X is D and E for acidic amino acids
XXXXXXXXXXXXXXXXXXXXXXXXXXXXX

SEQ ID NO: 431 - protein, 37 aa, Artificial; identical to SEQ ID NO: 423
  Completely synthesized peptide construct

SEQ ID NO: 432 - protein, 37 aa, Artificial; identical to SEQ ID NO: 158
  peptide construct
  MISC_FEATURE (1)..(1): X is M or Nle
  MISC_FEATURE (2)..(2): X is D and E for acidic amino acids
  MISC_FEATURE (3)..(3): X is F, W or Y for aromatic amino acids
  MISC_FEATURE (4)..(4): X is F, W or Y for aromatic amino acids
  MISC_FEATURE (5)..(5): X is C or S
  MISC_FEATURE (6)..(6): X is I, L or V
  MISC_FEATURE (7)..(7): X is D and E for acidic amino acids
  MISC_FEATURE (8)..(8): X is K, R or H for basic amino acids
  MISC_FEATURE (9)..(9): X is D and E for acidic amino acids
  MISC_FEATURE (10)..(10): X is K, R or H for basic amino acids
  MISC_FEATURE (11)..(11): X is F or P
  MISC_FEATURE (12)..(12): X is F or P
  MISC_FEATURE (13)..(13): X is F or P
  MISC_FEATURE (14)..(14): X is A or G
  MISC_FEATURE (15)..(15): X is T or S
  MISC_FEATURE (16)..(16): X is F or P
  MISC_FEATURE (17)..(17): X is T or S
  MISC_FEATURE (18)..(18): X is C or S
  MISC_FEATURE (19)..(19): X is I, L or V
  MISC_FEATURE (20)..(20): X is T or S
  MISC_FEATURE (21)..(21): X is T or S
  MISC_FEATURE (22)..(22): X  is A and G
  MISC_FEATURE (23)..(23): X is A and G
  MISC_FEATURE (24)..(24): X is A and G
  MISC_FEATURE (25)..(25): X is D and E for acidic amino acids
  MISC_FEATURE (26)..(26): X is I, L or V
  MISC_FEATURE (27)..(27): X is  I, L or V
  MISC_FEATURE (28)..(28): X is K, R or H for basic amino acids
  MISC_FEATURE (29)..(29): X is N or Q for amidated amino acids
  MISC_FEATURE (30)..(30): X is A and G
  MISC_FEATURE (31)..(31): X is D and E for acidic amino acids
  MISC_FEATURE (32)..(32): X is K, R or H for basic amino acids
  MISC_FEATURE (33)..(33): X is I, L or V
  MISC_FEATURE (34)..(34): X is D and E for acidic amino acids
  MISC_FEATURE (35)..(35): X is K, R or H for basic amino acids
  MISC_FEATURE (36)..(36): X is I, L or V
  MISC_FEATURE (37)..(37): X is D and E for acidic amino acids

SEQ ID NO: 433 - protein, 26 aa, Artificial
  Completely synthesized peptide construct
ERPTLAFLQDGGGDLLKNGERIEKVE

SEQ ID NO: 434 - protein, 26 aa, Artificial
  peptide construct
  MISC_FEATURE (1)..(1): X is D and E for acidic amino acids
  MISC_FEATURE (2)..(2): X is K, R or H for basic amino acids
  MISC_FEATURE (3)..(3): X is F or P
  MISC_FEATURE (4)..(4): X is T or S
  MISC_FEATURE (5)..(5): X is I, L or V
  MISC_FEATURE (6)..(6): X is A or G
  MISC_FEATURE (7)..(7): X is F, W or Y for aromatic amino acids
  MISC_FEATURE (8)..(8): X is I, L or V
  MISC_FEATURE (9)..(9): X is N or Q for amidated amino acids
  MISC_FEATURE (10)..(10): X is D and E for acidic amino acids
  MISC_FEATURE (11)..(11): X is A and G
  MISC_FEATURE (12)..(12): X is A and G
  MISC_FEATURE (13)..(13): X is A and G
  MISC_FEATURE (14)..(14): X is D and E for acidic amino acids
  MISC_FEATURE (15)..(15): X is I, L or V
  MISC_FEATURE (16)..(16): X is I, L or V
  MISC_FEATURE (17)..(17): X is K, R or H for basic amino acids
  MISC_FEATURE (18)..(18): X is N or Q for amidated amino acids
  MISC_FEATURE (19)..(19): X is A and G
  MISC_FEATURE (20)..(20): X is D and E for acidic amino acids
  MISC_FEATURE (21)..(21): X is K, R or H for basic amino acids
  MISC_FEATURE (22)..(22): X is I, L or V
  MISC_FEATURE (23)..(23): X is D and E for acidic amino acids
  MISC_FEATURE (24)..(24): X is K, R or H for basic amino acids
  MISC_FEATURE (25)..(25): X is I, L or V
  MISC_FEATURE (26)..(26): X is D and E for acidic amino acids
XXXXXXXXXXXXXXXXXXXXXXXXXX

SEQ ID NO: 435 - protein, 26 aa, Artificial
  Completely synthesized peptide construct
DRSTKVIDFHGGGDLLKNGERIEKVE

SEQ ID NO: 436 - protein, 26 aa, Artificial
  peptide construct
  MISC_FEATURE (1)..(1): X is D and E for acidic amino acids
  MISC_FEATURE (2)..(2): X is K, R or H for basic amino acids
  MISC_FEATURE (3)..(3): X is C or S
  MISC_FEATURE (4)..(4): X is T or S
  MISC_FEATURE (5)..(5): X is K, R or H for basic amino acids
  MISC_FEATURE (6)..(6): X is I, L or V
  MISC_FEATURE (7)..(7): X is I, L or V
  MISC_FEATURE (8)..(8): X is D and E for acidic amino acids
  MISC_FEATURE (9)..(9): X is F, W or Y for aromatic amino acids
  MISC_FEATURE (10)..(10): X is K, R or H for basic amino acids
  MISC_FEATURE (11)..(11): X is A and G
  MISC_FEATURE (12)..(12): X is A and G
  MISC_FEATURE (13)..(13): X is A and G
  MISC_FEATURE (14)..(14): X is D and E for acidic amino acids
  MISC_FEATURE (15)..(15): X is I, L or V
  MISC_FEATURE (16)..(16): X is I, L or V
  MISC_FEATURE (17)..(17): X is K, R or H for basic amino acids
  MISC_FEATURE (18)..(18): X is N or Q for amidated amino acids
  MISC_FEATURE (19)..(19): X is A and G
  MISC_FEATURE (20)..(20): X is D and E for acidic amino acids
  MISC_FEATURE (21)..(21): X is K, R or H for basic amino acids
  MISC_FEATURE (22)..(22): X is I, L or V
  MISC_FEATURE (23)..(23): X is D and E for acidic amino acids
  MISC_FEATURE (24)..(24): X is K, R or H for basic amino acids
  MISC_FEATURE (25)..(25): X is I, L or V
  MISC_FEATURE (26)..(26): X is D and E for acidic amino acids
XXXXXXXXXXXXXXXXXXXXXXXXXX

SEQ ID NO: 437 - protein, 29 aa, Artificial
  Completely synthesized peptide construct
IAGFKGEQGPKGEGGGDLLKNGERIEKVE

SEQ ID NO: 438 - protein, 29 aa, Artificial
  peptide construct
  MISC_FEATURE (1)..(1): X is I, L or V
  MISC_FEATURE (2)..(2): X is  A or G
  MISC_FEATURE (3)..(3): X is  A or G
  MISC_FEATURE (4)..(4): X is F, W or Y for aromatic amino acids
  MISC_FEATURE (5)..(5): X is K, R or H for basic amino acids
  MISC_FEATURE (6)..(6): X is A or G
  MISC_FEATURE (7)..(7): X is D and E for acidic amino acids
  MISC_FEATURE (8)..(8): X is N or Q for amidated amino acids
  MISC_FEATURE (9)..(9): X is A or G
  MISC_FEATURE (10)..(10): X is F or P
  MISC_FEATURE (11)..(11): X is K, R or H for basic amino acids
  MISC_FEATURE (12)..(12): X is A or G
  MISC_FEATURE (13)..(13): X is D and E for acidic amino acids
  MISC_FEATURE (14)..(14): X is A and G
  MISC_FEATURE (15)..(15): X is A and G
  MISC_FEATURE (16)..(16): X is A and G
  MISC_FEATURE (17)..(17): X is D and E for acidic amino acids
  MISC_FEATURE (18)..(18): X is I, L or V
  MISC_FEATURE (19)..(19): X is I, L or V
  MISC_FEATURE (20)..(20): X is K, R or H for basic amino acids
  MISC_FEATURE (21)..(21): X is N or Q for amidated amino acids
  MISC_FEATURE (22)..(22): X is A and G
  MISC_FEATURE (23)..(23): X is D and E for acidic amino acids
  MISC_FEATURE (24)..(24): X is K, R or H for basic amino acids
  MISC_FEATURE (25)..(25): X is I, L or V
  MISC_FEATURE (26)..(26): X is D and E for acidic amino acids
  MISC_FEATURE (27)..(27): X is K, R or H for basic amino acids
  MISC_FEATURE (28)..(28): X is I, L or V
  MISC_FEATURE (29)..(29): X is D and E for acidic amino acids
XXXXXXXXXXXXXXXXXXXXXXXXXXXXX

SEQ ID NO: 439 - protein, 16 aa, Artificial
  Completely synthesized peptide construct
GGGDLLKNGERIEKVE

SEQ ID NO: 440 - protein, 16 aa, Artificial
  peptide construct
  MISC_FEATURE (1)..(1): X is A and G
  MISC_FEATURE (2)..(2): X is A and G
  MISC_FEATURE (3)..(3): X is A and G
  MISC_FEATURE (4)..(4): X is D and E for acidic amino acids
  MISC_FEATURE (5)..(5): X is I, L or V
  MISC_FEATURE (6)..(6): X is I, L or V
  MISC_FEATURE (7)..(7): X is K, R or H for basic amino acids
  MISC_FEATURE (8)..(8): X is N or Q for amidated amino acids
  MISC_FEATURE (9)..(9): X is A and G
  MISC_FEATURE (10)..(10): X is D and E for acidic amino acids
  MISC_FEATURE (11)..(11): X is K, R or H for basic amino acids
  MISC_FEATURE (12)..(12): X is I, L or V
  MISC_FEATURE (13)..(13): X is D and E for acidic amino acids
  MISC_FEATURE (14)..(14): X is K, R or H for basic amino acids
  MISC_FEATURE (15)..(15): X is I, L or V
  MISC_FEATURE (16)..(16): X is D and E for acidic amino acids
XXXXXXXXXXXXXXXX

SEQ ID NO: 441 - protein, 24 aa, Artificial
  Completely synthesized peptide construct
KNIVTPRTGGGDLLKNGERIEKVE

SEQ ID NO: 442 - protein, 24 aa, Artificial
  peptide construct
  MISC_FEATURE (1)..(1): X is K, R or H for basic amino acids
  MISC_FEATURE (2)..(2): X is N or Q for amidated amino acids
  MISC_FEATURE (3)..(3): X is I, L or V
  MISC_FEATURE (4)..(4): X is I, L or V
  MISC_FEATURE (5)..(5): X is T or S
  MISC_FEATURE (6)..(6): X is F or P
  MISC_FEATURE (7)..(7): X is K, R or H for basic amino acids
  MISC_FEATURE (8)..(8): X is T or S
  MISC_FEATURE (9)..(9): X is A and G
  MISC_FEATURE (10)..(10): X is A and G
  MISC_FEATURE (11)..(11): X is A and G
  MISC_FEATURE (12)..(12): X is D and E for acidic amino acids
  MISC_FEATURE (13)..(13): X is I, L or V
  MISC_FEATURE (14)..(14): X is I, L or V
  MISC_FEATURE (15)..(15): X is K, R or H for basic amino acids
  MISC_FEATURE (16)..(16): X is N or Q for amidated amino acids
  MISC_FEATURE (17)..(17): X is A and G
  MISC_FEATURE (18)..(18): X is D and E for acidic amino acids
  MISC_FEATURE (19)..(19): X is K, R or H for basic amino acids
  MISC_FEATURE (20)..(20): X is I, L or V
  MISC_FEATURE (21)..(21): X is D and E for acidic amino acids
  MISC_FEATURE (22)..(22): X is K, R or H for basic amino acids
  MISC_FEATURE (23)..(23): X is I, L or V
  MISC_FEATURE (24)..(24): X is D and E for acidic amino acids
XXXXXXXXXXXXXXXXXXXXXXXX

SEQ ID NO: 443 - protein, 31 aa, Artificial
  Completely synthesized peptide construct
GDKVSFFCKNKEKKCGGGDLLKNGERIEKVE

SEQ ID NO: 444 - protein, 31 aa, Artificial; identical to SEQ ID NO: 130
  peptide construct
  MISC_FEATURE (1)..(1): X is A or G
  MISC_FEATURE (2)..(2): X is D and E for acidic amino acids
  MISC_FEATURE (3)..(3): X is K, R or H for basic amino acids
  MISC_FEATURE (4)..(4): X is I, L or V
  MISC_FEATURE (5)..(5): X is C or S
  MISC_FEATURE (6)..(6): X is F, W or Y for aromatic amino acids
  MISC_FEATURE (7)..(7): X is F, W or Y for aromatic amino acids
  MISC_FEATURE (8)..(8): X is C or S
  MISC_FEATURE (9)..(9): X is K, R or H for basic amino acids
  MISC_FEATURE (10)..(10): X is N or Q for amidated amino acids
  MISC_FEATURE (11)..(11): X is K, R or H for basic amino acids
  MISC_FEATURE (12)..(12): X is D and E for acidic amino acids
  MISC_FEATURE (13)..(13): X is K, R or H for basic amino acids
  MISC_FEATURE (14)..(14): X is K, R or H for basic amino acids
  MISC_FEATURE (15)..(15): X is C or S
  MISC_FEATURE (16)..(16): X is A and G
  MISC_FEATURE (17)..(17): X is A and G
  MISC_FEATURE (18)..(18): X is A and G
  MISC_FEATURE (19)..(19): X is D and E for acidic amino acids
  MISC_FEATURE (20)..(20): X is I, L or V
  MISC_FEATURE (21)..(21): X is I, L or V
  MISC_FEATURE (22)..(22): X is K, R or H for basic amino acids
  MISC_FEATURE (23)..(23): X is N or Q for amidated amino acids
  MISC_FEATURE (24)..(24): X is A and G
  MISC_FEATURE (25)..(25): X is D and E for acidic amino acids
  MISC_FEATURE (26)..(26): X is K, R or H for basic amino acids
  MISC_FEATURE (27)..(27): X is I, L or V
  MISC_FEATURE (28)..(28): X is D and E for acidic amino acids
  MISC_FEATURE (29)..(29): X is K, R or H for basic amino acids
  MISC_FEATURE (30)..(30): X is I, L or V
  MISC_FEATURE (31)..(31): X is D and E for acidic amino acids

SEQ ID NO: 445 - protein, 33 aa, Artificial
  Completely synthesized peptide construct
EIIVTHFPFDEQNCSMKGGGDLLKNGERIEKVE

SEQ ID NO: 446 - protein, 33 aa, Artificial; identical to SEQ ID NO: 99
  peptide construct
  MISC_FEATURE (1)..(1): X is D and E for acidic amino acids
  MISC_FEATURE (2)..(2): X is I, L or V
  MISC_FEATURE (3)..(3): X is I, L or V
  MISC_FEATURE (4)..(4): X is I, L or V
  MISC_FEATURE (5)..(5): X is T or S
  MISC_FEATURE (6)..(6): X is K, R or H for basic amino acids
  MISC_FEATURE (7)..(7): X is F, W or Y for aromatic amino acids
  MISC_FEATURE (8)..(8): X is F or P
  MISC_FEATURE (9)..(9): X is F, W or Y for aromatic amino acids
  MISC_FEATURE (10)..(10): X is D and E for acidic amino acids
  MISC_FEATURE (11)..(11): X is D and E for acidic amino acids
  MISC_FEATURE (12)..(12): X is N or Q for amidated amino acids
  MISC_FEATURE (13)..(13): X is N or Q for amidated amino acids
  MISC_FEATURE (14)..(14): X is C or S
  MISC_FEATURE (15)..(15): X is C or S
  MISC_FEATURE (16)..(16): X is M or Nle
  MISC_FEATURE (17)..(17): X is K, R or H for basic amino acids
  MISC_FEATURE (18)..(18): X  is A and G
  MISC_FEATURE (19)..(19): X is A and G
  MISC_FEATURE (20)..(20): X is A and G
  MISC_FEATURE (21)..(21): X is D and E for acidic amino acids
  MISC_FEATURE (22)..(22): X is I, L or V
  MISC_FEATURE (23)..(23): X is I, L or V
  MISC_FEATURE (24)..(24): X is K, R or H for basic amino acids
  MISC_FEATURE (25)..(25): X is N or Q for amidated amino acids
  MISC_FEATURE (26)..(26): X is A and G
  MISC_FEATURE (27)..(27): X is D and E for acidic amino acids
  MISC_FEATURE (28)..(28): X is K, R or H for basic amino acids
  MISC_FEATURE (29)..(29): X is I, L or V
  MISC_FEATURE (30)..(30): X is D and E for acidic amino acids
  MISC_FEATURE (31)..(31): X is K, R or H for basic amino acids
  MISC_FEATURE (32)..(32): X is I, L or V
  MISC_FEATURE (33)..(33): X is D and E for acidic amino acids

SEQ ID NO: 447 - protein, 29 aa, Artificial
  Completely synthesized peptide construct
VHFFKNIVTPRTPGGGDLLKNGERIEKVE

SEQ ID NO: 448 - protein, 29 aa, Artificial
  peptide construct
  MISC_FEATURE (1)..(1): X is I, L or V
  MISC_FEATURE (2)..(2): X is K, R or H for basic amino acids
  MISC_FEATURE (3)..(3): X is F, W or Y for aromatic amino acids
  MISC_FEATURE (4)..(4): X is F, W or Y for aromatic amino acids
  MISC_FEATURE (5)..(5): X is K, R or H for basic amino acids
  MISC_FEATURE (6)..(6): X is N or Q for amidated amino acids
  MISC_FEATURE (7)..(7): X is I, L or V
  MISC_FEATURE (8)..(8): X is I, L or V
  MISC_FEATURE (9)..(9): X is T or S
  MISC_FEATURE (10)..(10): X is F or P
  MISC_FEATURE (11)..(11): X is K, R or H for basic amino acids
  MISC_FEATURE (12)..(12): X is T or S
  MISC_FEATURE (13)..(13): X is F or P
  MISC_FEATURE (14)..(14): X is A and G
  MISC_FEATURE (15)..(15): X is A and G
  MISC_FEATURE (16)..(16): X is A and G
  MISC_FEATURE (17)..(17): X is D and E for acidic amino acids
  MISC_FEATURE (18)..(18): X is I, L or V
  MISC_FEATURE (19)..(19): X is I, L or V
  MISC_FEATURE (20)..(20): X is K, R or H for basic amino acids
  MISC_FEATURE (21)..(21): X is N or Q for amidated amino acids
  MISC_FEATURE (22)..(22): X is A and G
  MISC_FEATURE (23)..(23): X is D and E for acidic amino acids
  MISC_FEATURE (24)..(24): X is K, R or H for basic amino acids
  MISC_FEATURE (25)..(25): X is I, L or V
  MISC_FEATURE (26)..(26): X is D and E for acidic amino acids
  MISC_FEATURE (27)..(27): X is K, R or H for basic amino acids
  MISC_FEATURE (28)..(28): X is I, L or V
  MISC_FEATURE (29)..(29): X is D and E for acidic amino acids
XXXXXXXXXXXXXXXXXXXXXXXXXXXXX

SEQ ID NO: 449 - protein, 33 aa, Artificial
  Completely synthesized peptide construct
YQQLNSERGVPNENIENGGGDLLKNGERIEKVE

SEQ ID NO: 450 - protein, 33 aa, Artificial; identical to SEQ ID NO: 99
  peptide construct
  MISC_FEATURE (1)..(1): X is F, W or Y for aromatic amino acids
  MISC_FEATURE (2)..(2): X is N or Q for amidated amino acids
  MISC_FEATURE (3)..(3): X is N or Q for amidated amino acids
  MISC_FEATURE (4)..(4): X is I, L or V
  MISC_FEATURE (5)..(5): X is N or Q for amidated amino acids
  MISC_FEATURE (6)..(6): X is C or S
  MISC_FEATURE (7)..(7): X is D and E for acidic amino acids
  MISC_FEATURE (8)..(8): X is K, R or H for basic amino acids
  MISC_FEATURE (9)..(9): X is A or G
  MISC_FEATURE (10)..(10): X is I, L or V
  MISC_FEATURE (11)..(11): X is F or P
  MISC_FEATURE (12)..(12): X is N or Q for amidated amino acids
  MISC_FEATURE (13)..(13): X is D and E for acidic amino acids
  MISC_FEATURE (14)..(14): X is N or Q for amidated amino acids
  MISC_FEATURE (15)..(15): X is I, L or V
  MISC_FEATURE (16)..(16): X is D and E for acidic amino acids
  MISC_FEATURE (17)..(17): X is N or Q for amidated amino acids
  MISC_FEATURE (18)..(18): X is A and G
  MISC_FEATURE (19)..(19): X is A and G
  MISC_FEATURE (20)..(20): X is A and G
  MISC_FEATURE (21)..(21): X is D and E for acidic amino acids
  MISC_FEATURE (22)..(22): X is I, L or V
  MISC_FEATURE (23)..(23): X is I, L or V
  MISC_FEATURE (24)..(24): X is K, R or H for basic amino acids
  MISC_FEATURE (25)..(25): X is N or Q for amidated amino acids
  MISC_FEATURE (26)..(26): X is A and G
  MISC_FEATURE (27)..(27): X is D and E for acidic amino acids
  MISC_FEATURE (28)..(28): X is K, R or H for basic amino acids
  MISC_FEATURE (29)..(29): X is I, L or V
  MISC_FEATURE (30)..(30): X is D and E for acidic amino acids
  MISC_FEATURE (31)..(31): X is K, R or H for basic amino acids
  MISC_FEATURE (32)..(32): X is I, L or V
  MISC_FEATURE (33)..(33): X is D and E for acidic amino acids

SEQ ID NO: 451 - protein, 29 aa, Artificial
  Completely synthesized peptide construct
VFIKRVSNVIIHGGGGDLLKNGERIEKVE

SEQ ID NO: 452 - protein, 29 aa, Artificial
  peptide construct
  MISC_FEATURE (1)..(1): X is I, L or V
  MISC_FEATURE (2)..(2): X is F, W or Y for aromatic amino acids
  MISC_FEATURE (3)..(3): X is I, L or V
  MISC_FEATURE (4)..(4): X is K, R or H for basic amino acids
  MISC_FEATURE (5)..(5): X is K, R or H for basic amino acids
  MISC_FEATURE (6)..(6): X is I, L or V
  MISC_FEATURE (7)..(7): X is C or S
  MISC_FEATURE (8)..(8): X is N or Q for amidated amino acids
  MISC_FEATURE (9)..(9): X is I, L or V
  MISC_FEATURE (10)..(10): X is I, L or V
  MISC_FEATURE (11)..(11): X is I, L or V
  MISC_FEATURE (12)..(12): X is K, R or H for basic amino acids
  MISC_FEATURE (13)..(13): X is A or G
  MISC_FEATURE (14)..(14): X is A and G
  MISC_FEATURE (15)..(15): X is A and G
  MISC_FEATURE (16)..(16): X is A and G
  MISC_FEATURE (17)..(17): X is D and E for acidic amino acids
  MISC_FEATURE (18)..(18): X is I, L or V
  MISC_FEATURE (19)..(19): X is I, L or V
  MISC_FEATURE (20)..(20): X is  K, R or H for basic amino acids
  MISC_FEATURE (21)..(21): X is N or Q for amidated amino acids
  MISC_FEATURE (22)..(22): X is A and G
  MISC_FEATURE (23)..(23): X is D and E for acidic amino acids
  MISC_FEATURE (24)..(24): X is K, R or H for basic amino acids
  MISC_FEATURE (25)..(25): X is I, L or V
  MISC_FEATURE (26)..(26): X is D and E for acidic amino acids
  MISC_FEATURE (27)..(27): X is K, R or H for basic amino acids
  MISC_FEATURE (28)..(28): X is I, L or V
  MISC_FEATURE (29)..(29): X is D and E for acidic amino acids
XXXXXXXXXXXXXXXXXXXXXXXXXXXXX

SEQ ID NO: 453 - protein, 31 aa, Artificial
  Completely synthesized peptide construct
MKVTVAFNQFGPNRRGGGDLLKNGERIEKVE

SEQ ID NO: 454 - protein, 31 aa, Artificial; identical to SEQ ID NO: 130
  peptide construct
  MISC_FEATURE (1)..(1): X is M or Nle
  MISC_FEATURE (2)..(2): X is K, R or H for basic amino acids
  MISC_FEATURE (3)..(3): X is I, L or V
  MISC_FEATURE (4)..(4): X is T or S
  MISC_FEATURE (5)..(5): X is I, L or V
  MISC_FEATURE (6)..(6): X is A or G
  MISC_FEATURE (7)..(7): X is F, W or Y for aromatic amino acids
  MISC_FEATURE (8)..(8): X is N or Q for amidated amino acids
  MISC_FEATURE (9)..(9): X is N or Q for amidated amino acids
  MISC_FEATURE (10)..(10): X is F, W or Y for amidated amino acids
  MISC_FEATURE (11)..(11): X is A or G
  MISC_FEATURE (12)..(12): X is F or P
  MISC_FEATURE (13)..(13): X is N or Q for amidated amino acids
  MISC_FEATURE (14)..(14): X is K, R or H for basic amino acids
  MISC_FEATURE (15)..(15): X is K, R or H for basic amino acids
  MISC_FEATURE (16)..(16): X is A and G
  MISC_FEATURE (17)..(17): X is A and G
  MISC_FEATURE (18)..(18): X is A and G
  MISC_FEATURE (19)..(19): X is D and E for acidic amino acids
  MISC_FEATURE (20)..(20): X is I, L or V
  MISC_FEATURE (21)..(21): X is I, L or V
  MISC_FEATURE (22)..(22): X is K, R or H for basic amino acids
  MISC_FEATURE (23)..(23): X is N or Q for amidated amino acids
  MISC_FEATURE (24)..(24): X is A and G
  MISC_FEATURE (25)..(25): X is D and E for acidic amino acids
  MISC_FEATURE (26)..(26): X is K, R or H for basic amino acids
  MISC_FEATURE (27)..(27): X is I, L or V
  MISC_FEATURE (28)..(28): X is D and E for acidic amino acids
  MISC_FEATURE (29)..(29): X is K, R or H for basic amino acids
  MISC_FEATURE (30)..(30): X is I, L or V
  MISC_FEATURE (31)..(31): X is D and E for acidic amino acids

SEQ ID NO: 455 - protein, 31 aa, Artificial
  Completely synthesized peptide construct
IASRRVDGIIAAYQNGGGDLLKNGERIEKVE

SEQ ID NO: 456 - protein, 31 aa, Artificial; identical to SEQ ID NO: 130
  peptide construct
  MISC_FEATURE (1)..(1): X is I, L or V
  MISC_FEATURE (2)..(2): X is A or G
  MISC_FEATURE (3)..(3): X is C or S
  MISC_FEATURE (4)..(4): X is K, R or H for basic amino acids
  MISC_FEATURE (5)..(5): X is K, R or H for basic amino acids
  MISC_FEATURE (6)..(6): X is I, L or V
  MISC_FEATURE (7)..(7): X is D and E for acidic amino acids
  MISC_FEATURE (8)..(8): X is A or G
  MISC_FEATURE (9)..(9): X is I, L or V
  MISC_FEATURE (10)..(10): X is I, L or V
  MISC_FEATURE (11)..(11): X is A or G
  MISC_FEATURE (12)..(12): X is A or G
  MISC_FEATURE (13)..(13): X is F, W or Y for aromatic amino acids
  MISC_FEATURE (14)..(14): X is N or Q for amidated amino acids
  MISC_FEATURE (15)..(15): X is N or Q for amidated amino acids
  MISC_FEATURE (16)..(16): X is A and G
  MISC_FEATURE (17)..(17): X is A and G
  MISC_FEATURE (18)..(18): X is A and G
  MISC_FEATURE (19)..(19): X is D and E for acidic amino acids
  MISC_FEATURE (20)..(20): X is I, L or V
  MISC_FEATURE (21)..(21): X is I, L or V
  MISC_FEATURE (22)..(22): X is K, R or H for basic amino acids
  MISC_FEATURE (23)..(23): X is N or Q for amidated amino acids
  MISC_FEATURE (24)..(24): X is A and G
  MISC_FEATURE (25)..(25): X is D and E for acidic amino acids
  MISC_FEATURE (26)..(26): X is K, R or H for basic amino acids
  MISC_FEATURE (27)..(27): X is I, L or V
  MISC_FEATURE (28)..(28): X is D and E for acidic amino acids
  MISC_FEATURE (29)..(29): X is K, R or H for basic amino acids
  MISC_FEATURE (30)..(30): X is I, L or V
  MISC_FEATURE (31)..(31): X is D and E for acidic amino acids

SEQ ID NO: 457 - protein, 35 aa, Artificial
  Completely synthesized peptide construct
IDIFASKNFHLQKNTIGTGGGGDLLKNGERIEKVE

SEQ ID NO: 458 - protein, 35 aa, Artificial; identical to SEQ ID NO: 206
  peptide construct
  MISC_FEATURE (1)..(1): X is I, L or V
  MISC_FEATURE (2)..(2): X is D and E for acidic amino acids
  MISC_FEATURE (3)..(3): X is I, L or V
  MISC_FEATURE (4)..(4): X is F, W or Y for aromatic amino acids
  MISC_FEATURE (5)..(5): X is A or G
  MISC_FEATURE (6)..(6): X is C or S
  MISC_FEATURE (7)..(7): X is K, R or H for basic amino acids
  MISC_FEATURE (8)..(8): X is N or Q for amidated amino acids
  MISC_FEATURE (9)..(9): X is F, W or Y for aromatic amino acids
  MISC_FEATURE (10)..(10): X is K, R or H for basic amino acids
  MISC_FEATURE (11)..(11): X is I, L or V
  MISC_FEATURE (12)..(12): X is N or Q for amidated amino acids
  MISC_FEATURE (13)..(13): X is K, R or H for basic amino acids
  MISC_FEATURE (14)..(14): X is N or Q for amidated amino acids
  MISC_FEATURE (15)..(15): X is T or S
  MISC_FEATURE (16)..(16): X is I, L or V
  MISC_FEATURE (17)..(17): X is A or G
  MISC_FEATURE (18)..(18): X is T or S
  MISC_FEATURE (19)..(19): X is A or G
  MISC_FEATURE (20)..(20): X is A and G
  MISC_FEATURE (21)..(21): X is A and G
  MISC_FEATURE (22)..(22): X is A and G
  MISC_FEATURE (23)..(23): X is D and E for acidic amino acids
  MISC_FEATURE (24)..(24): X is I, L or V
  MISC_FEATURE (25)..(25): X is I, L or V
  MISC_FEATURE (26)..(26): X is K, R or H for basic amino acids
  MISC_FEATURE (27)..(27): X is N or Q for amidated amino acids
  MISC_FEATURE (28)..(28): X is A and G
  MISC_FEATURE (29)..(29): X is D and E for acidic amino acids
  MISC_FEATURE (30)..(30): X is K, R or H for basic amino acids
  MISC_FEATURE (31)..(31): X is I, L or V
  MISC_FEATURE (32)..(32): X is D and E for acidic amino acids
  MISC_FEATURE (33)..(33): X is K, R or H for basic amino acids
  MISC_FEATURE (34)..(34): X is I, L or V
  MISC_FEATURE (35)..(35): X is D and E for acidic amino acids

SEQ ID NO: 459 - protein, 41 aa, Artificial
  Completely synthesized peptide construct
GIGAVLKVLTTGPALISWIKRKRQQGGGDLLKNGERIEKVE

SEQ ID NO: 460 - protein, 41 aa, Artificial; identical to SEQ ID NO: 380
  Completely synthesized peptide construct
  MISC_FEATURE (1)..(1): X is A or G
  MISC_FEATURE (2)..(2): X is I, L or V
  MISC_FEATURE (3)..(3): X is A or G
  MISC_FEATURE (4)..(4): X is A or G
  MISC_FEATURE (5)..(5): X is I, L or V
  MISC_FEATURE (6)..(6): X is I, L or V
  MISC_FEATURE (7)..(7): X is K, R or H for basic amino acids
  MISC_FEATURE (8)..(8): X is I, L or V
  MISC_FEATURE (9)..(9): X is I, L or V
  MISC_FEATURE (10)..(10): X is T or S
  MISC_FEATURE (11)..(11): X is T or S
  MISC_FEATURE (12)..(12): X is A or G
  MISC_FEATURE (13)..(13): X is F or P
  MISC_FEATURE (14)..(14): X is A or G
  MISC_FEATURE (15)..(15): X is I, L or V
  MISC_FEATURE (16)..(16): X is I, L or V
  MISC_FEATURE (17)..(17): X is C or S
  MISC_FEATURE (18)..(18): X is F, W or Y for aromatic amino acids
  MISC_FEATURE (19)..(19): X is I, L or V
  MISC_FEATURE (20)..(20): X is K, R or H for basic amino acids
  MISC_FEATURE (21)..(21): X is K, R or H for basic amino acids
  MISC_FEATURE (22)..(22): X is K, R or H for basic amino acids
  MISC_FEATURE (23)..(23): X is K, R or H for basic amino acids
  MISC_FEATURE (24)..(24): X is N or Q for amidated amino acids
  MISC_FEATURE (25)..(25): X is N or Q for amidated amino acids
  MISC_FEATURE (26)..(26): X is A and G
  MISC_FEATURE (27)..(27): X is A and G
  MISC_FEATURE (28)..(28): X is A and G
  MISC_FEATURE (29)..(29): X is D and E for acidic amino acids
  MISC_FEATURE (30)..(30): X is I, L or V
  MISC_FEATURE (31)..(31): X is I, L or V
  MISC_FEATURE (32)..(32): X is K, R or H for basic amino acids
  MISC_FEATURE (33)..(33): X is N or Q for amidated amino acids
  MISC_FEATURE (34)..(34): X is A and G
  MISC_FEATURE (35)..(35): X is D and E for acidic amino acids
  MISC_FEATURE (36)..(36): X is K, R or H for basic amino acids
  MISC_FEATURE (37)..(37): X is I, L or V
  MISC_FEATURE (38)..(38): X is D and E for acidic amino acids
  MISC_FEATURE (39)..(39): X is K, R or H for basic amino acids
  MISC_FEATURE (40)..(40): X is I, L or V
  MISC_FEATURE (41)..(41): X is D and E for acidic amino acids

SEQ ID NO: 461 - protein, 21 aa, Artificial
  Completely synthesized peptide construct
VSSVSSQFSDAAQASPSSHSS

SEQ ID NO: 462 - protein, 21 aa, Artificial
  Completely synthesized peptide construct
  MISC_FEATURE (1)..(1): X is I, L or V
  MISC_FEATURE (2)..(2): X is T or S
  MISC_FEATURE (3)..(3): X is T or S
  MISC_FEATURE (4)..(4): X is I, L or V
  MISC_FEATURE (5)..(5): X is T or S
  MISC_FEATURE (6)..(6): X is T or S
  MISC_FEATURE (7)..(7): X is N or Q for amidated amino acids
  MISC_FEATURE (8)..(8): X is F or P
  MISC_FEATURE (9)..(9): X is T or S
  MISC_FEATURE (10)..(10): X is D and E for acidic amino acids
  MISC_FEATURE (11)..(11): X is A and G
  MISC_FEATURE (12)..(12): X is A and g
  MISC_FEATURE (13)..(13): X is T or S
  MISC_FEATURE (14)..(14): X is A and G
  MISC_FEATURE (15)..(15): X is T or S
  MISC_FEATURE (16)..(16): X is F or P
  MISC_FEATURE (17)..(17): X is T or S
  MISC_FEATURE (18)..(18): X is T or S
  MISC_FEATURE (19)..(19): X is K, R or H for basic amino acids
  MISC_FEATURE (20)..(20): X is T or S
  MISC_FEATURE (21)..(21): X is T or S
XXXXXXXXXXXXXXXXXXXXX

SEQ ID NO: 463 - protein, 16 aa, Artificial
  completely synthesized peptide construct
DLLKNGERIEKVEGGG

SEQ ID NO: 464 - protein, 22 aa, Artificial
  Completely synthesized peptide construct
  MISC_FEATURE (1)..(1): X is acetyl or propionyl group, D glycine or D alanine, cyclohexylalanine at amino terminus
  MISC_FEATURE (2)..(2): X is I, L or V
  MISC_FEATURE (3)..(3): X is T or S
  MISC_FEATURE (4)..(4): X is T or S
  MISC_FEATURE (5)..(5): X is I, L or V
  MISC_FEATURE (6)..(6): X is T or S
  MISC_FEATURE (7)..(7): X is T or S
  MISC_FEATURE (8)..(8): X is N or Q for amidated amino acids
  MISC_FEATURE (9)..(9): X is F or P
  MISC_FEATURE (10)..(10): X is T or S
  MISC_FEATURE (11)..(11): X is D and E for acidic amino acids
  MISC_FEATURE (12)..(12): X is A and G
  MISC_FEATURE (13)..(13): X is A and G
  MISC_FEATURE (14)..(14): X is T or S
  MISC_FEATURE (15)..(15): X is A and G
  MISC_FEATURE (16)..(16): X is T or S
  MISC_FEATURE (17)..(17): X is F or P
  MISC_FEATURE (18)..(18): X is T or S
  MISC_FEATURE (19)..(19): X is T or S
  MISC_FEATURE (20)..(20): X is K, R or H for basic amino acids
  MISC_FEATURE (21)..(21): X is T or S
  MISC_FEATURE (22)..(22): X is T or S
XXXXXXXXXXXXXXXXXXXXXX

SEQ ID NO: 465 - protein, 21 aa, Artificial
  Completely synthesized peptide construct
MVWESGCTVIVMLTPLVEDGV

SEQ ID NO: 466 - protein, 21 aa, Artificial
  Completely synthesized peptide construct
  MISC_FEATURE (1)..(1): X is M or Nle (Norleucine)
  MISC_FEATURE (2)..(2): X is I, L or V
  MISC_FEATURE (3)..(3): X is F, W or Y for aromatic amino acids
  MISC_FEATURE (4)..(4): X is D and E for acidic amino acids
  MISC_FEATURE (5)..(5): X is T or S
  MISC_FEATURE (6)..(6): X is A and G
  MISC_FEATURE (7)..(7): X is C or S
  MISC_FEATURE (8)..(8): X is T or S
  MISC_FEATURE (9)..(9): X is I, L or V
  MISC_FEATURE (10)..(10): X is I, L or V
  MISC_FEATURE (11)..(11): X is I, L or V
  MISC_FEATURE (12)..(12): X is M or Nle (Norleucine)
  MISC_FEATURE (13)..(13): X is I, L or V
  MISC_FEATURE (14)..(14): X is I, L or V
  MISC_FEATURE (15)..(15): X is F or P
  MISC_FEATURE (16)..(16): X is I, L or V
  MISC_FEATURE (17)..(17): X is I, L or V
  MISC_FEATURE (18)..(18): X is D and E for acidic amino acids
  MISC_FEATURE (19)..(19): X is D and E for acidic amino acids
  MISC_FEATURE (20)..(20): X is A and G
  MISC_FEATURE (21)..(21): X is I, L or V
XXXXXXXXXXXXXXXXXXXXX

SEQ ID NO: 467 - protein, 22 aa, Artificial
  Completely synthesized peptide construct
  MISC_FEATURE (1)..(1): X is acetyl or propionyl group, D glycine or D alanine, cyclohexylalanine at amino terminus
  MISC_FEATURE (2)..(2): X is M or Nle (Norleucine)
  MISC_FEATURE (3)..(3): X is I, L or V
  MISC_FEATURE (4)..(4): X is F, W or Y for aromatic amino acids
  MISC_FEATURE (5)..(5): X is D and E for acidic amino acids
  MISC_FEATURE (6)..(6): X is T or S
  MISC_FEATURE (7)..(7): X is A and G
  MISC_FEATURE (8)..(8): X is C or S
  MISC_FEATURE (9)..(9): X is T or S
  MISC_FEATURE (10)..(10): X is I, L or V
  MISC_FEATURE (11)..(11): X is I, L or V
  MISC_FEATURE (12)..(12): X is I, L or V
  MISC_FEATURE (13)..(13): X is M or Nle (Norleucine)
  MISC_FEATURE (14)..(14): X is I, L or V
  MISC_FEATURE (15)..(15): X is I, L or V
  MISC_FEATURE (16)..(16): X is F or P
  MISC_FEATURE (17)..(17): X is I, L or V
  MISC_FEATURE (18)..(18): X is I, L or V
  MISC_FEATURE (19)..(19): X is I, L or V
  MISC_FEATURE (19)..(19): X is D and E for acidic amino acids
  MISC_FEATURE (20)..(20): X is D and E for acidic amino acids
  MISC_FEATURE (21)..(21): X is A and G
  MISC_FEATURE (22)..(22): X is I, L or V
XXXXXXXXXXXXXXXXXXXXXX

SEQ ID NO: 468 - protein, 20 aa, Artificial
  Completely synthesized peptide construct
  MISC_FEATURE (1)..(1): X is M or Nle (Norleucine)
  MISC_FEATURE (2)..(2): X is I, L or V
  MISC_FEATURE (3)..(3): X is F, W or Y for aromatic amino acids
  MISC_FEATURE (4)..(4): X is D and E for acidic amino acids
  MISC_FEATURE (5)..(5): X is T or S
  MISC_FEATURE (6)..(6): X is A and G
  MISC_FEATURE (7)..(7): X is C or S
  MISC_FEATURE (8)..(8): X is T or S
  MISC_FEATURE (9)..(9): X is Gaba2 for X2X3 or X3X3 or X2X3 or X3X2 or X3X3 or X2X2
  MISC_FEATURE (10)..(10): X is I, L or V
  MISC_FEATURE (11)..(11): X is M or Nle (Norleucine)
  MISC_FEATURE (12)..(12): X is I, L or V
  MISC_FEATURE (13)..(13): X is I, L or V
  MISC_FEATURE (14)..(14): X is F or P
  MISC_FEATURE (15)..(15): X is I, L or V
  MISC_FEATURE (16)..(16): X is I, L or V
  MISC_FEATURE (17)..(17): X is D and E or acidic amino acids
  MISC_FEATURE (18)..(18): X is D and E or acidic amino acids
  MISC_FEATURE (19)..(19): X is A and G
  MISC_FEATURE (20)..(20): X is I, L or V
XXXXXXXXXXXXXXXXXXXX

SEQ ID NO: 469 - protein, 20 aa, Artificial
  Completely synthesized peptide construct
  MISC_FEATURE (1)..(1): X is M or Nle (Norleucine)
  MISC_FEATURE (2)..(2): X is I, L or V
  MISC_FEATURE (3)..(3): X is F, W or Y for aromatic amino acids
  MISC_FEATURE (4)..(4): X is D and E for acidic amino acids
  MISC_FEATURE (5)..(5): X is T or S
  MISC_FEATURE (6)..(6): X is A and G
  MISC_FEATURE (7)..(7): X is C or S
  MISC_FEATURE (8)..(8): X is T or s
  MISC_FEATURE (9)..(9): X is I, L or V
  MISC_FEATURE (10)..(10): X is Gaba2 for X2X3 or X3X2 or X2X3 or X3X2 or X3X3 or X2X2
  MISC_FEATURE (11)..(11): X is M or Nle (Norleucine)
  MISC_FEATURE (12)..(12): X is I, L or V
  MISC_FEATURE (13)..(13): X is I, L or V
  MISC_FEATURE (14)..(14): X is F or P
  MISC_FEATURE (15)..(15): X is I, L or V
  MISC_FEATURE (16)..(16): X is I, L or V
  MISC_FEATURE (17)..(17): X is D and E for acidic amino acids
  MISC_FEATURE (18)..(18): X is D and E for acidic amino acids
  MISC_FEATURE (19)..(19): X is A and G
  MISC_FEATURE (20)..(20): X is I, L or V
XXXXXXXXXXXXXXXXXXXX

SEQ ID NO: 470 - protein, 20 aa, Artificial
  Completely synthesized peptide construct
  MISC_FEATURE (1)..(1): X is M or Nle (Norleucine)
  MISC_FEATURE (2)..(2): X is I, L or V
  MISC_FEATURE (3)..(3): X is F, W or Y for aromatic amino acids
  MISC_FEATURE (4)..(4): X is D and E for acidic amino acids
  MISC_FEATURE (5)..(5): X is T or S
  MISC_FEATURE (6)..(6): X is A and G
  MISC_FEATURE (7)..(7): X is C or S
  MISC_FEATURE (8)..(8): X is T or S
  MISC_FEATURE (9)..(9): X is I, L or V
  MISC_FEATURE (10)..(10): X is I, L or V
  MISC_FEATURE (11)..(11): X is I, L or V
  MISC_FEATURE (12)..(12): X is I, L or V
  MISC_FEATURE (12)..(12): X is M or Nle (Norleucine)
  MISC_FEATURE (13)..(13): X is I, L or V
  MISC_FEATURE (14)..(14): X is I, L or V
  MISC_FEATURE (15)..(15): X is F or P
  MISC_FEATURE (16)..(16): X is I, L or V
  MISC_FEATURE (17)..(17): X is I, L or V
  MISC_FEATURE (18)..(18): X is Gaba2 for X2X3 or X3X2 or X2X3 or X3X2 or X3X3 or X2X2
  MISC_FEATURE (19)..(19): X is A and G
  MISC_FEATURE (20)..(20): X is I, L or V
XXXXXXXXXXXXXXXXXXXX

SEQ ID NO: 471 - protein, 19 aa, Artificial
  Completely synthesized peptide construct
  MISC_FEATURE (1)..(1): X is M or Nle (Norleucine)
  MISC_FEATURE (2)..(2): X is I, L or V
  MISC_FEATURE (3)..(3): X is F, W or Y for aromatic amino acids
  MISC_FEATURE (4)..(4): X is D and E for acidic amino acids
  MISC_FEATURE (5)..(5): X is T or S
  MISC_FEATURE (6)..(6): X is A and G
  MISC_FEATURE (7)..(7): X is C or S
  MISC_FEATURE (8)..(8): X is T or S
  MISC_FEATURE (9)..(9): X is 5-aminopentanoic acid for replacement of 3 or 4 amino acids of X2 and X3
  MISC_FEATURE (10)..(10): X is M or Nle (Norleucine)
  MISC_FEATURE (11)..(11): X is I, L or V
  MISC_FEATURE (12)..(12): X is I, L or V
  MISC_FEATURE (13)..(13): X is F or P
  MISC_FEATURE (14)..(14): X is I, L or V
  MISC_FEATURE (15)..(15): X is I, L or V
  MISC_FEATURE (16)..(16): X is D and E for acidic amino acids
  MISC_FEATURE (17)..(17): X is D and E for acidic amino acids
  MISC_FEATURE (18)..(18): X is A and G
  MISC_FEATURE (19)..(19): X is I, L or V
XXXXXXXXXXXXXXXXXXX

SEQ ID NO: 472 - protein, 18 aa, Artificial
  Completely synthesized peptide construct
  MISC_FEATURE (1)..(1): X is M or Nle (Norleucine)
  MISC_FEATURE (2)..(2): X is I, L or V
  MISC_FEATURE (3)..(3): X is F, W or Y for aromatic amino acids
  MISC_FEATURE (4)..(4): X is D and E for acidic amino acids
  MISC_FEATURE (5)..(5): X is T or S
  MISC_FEATURE (6)..(6): X is A and G
  MISC_FEATURE (7)..(7): X is C or S
  MISC_FEATURE (8)..(8): X is T or S
  MISC_FEATURE (9)..(9): X is I, L or V
  MISC_FEATURE (10)..(10): X is I, L or V
  MISC_FEATURE (11)..(11): X is I, L or V
  MISC_FEATURE (12)..(12): X is M or Nle (Norleucine)
  MISC_FEATURE (13)..(13): X is I, L or V
  MISC_FEATURE (14)..(14): X is I, L or V
  MISC_FEATURE (15)..(15): X is F or P
  MISC_FEATURE (16)..(16): X is 5-aminopentanoic acid for replacement of 3 or 4 amino acids of X2 and X3
  MISC_FEATURE (17)..(17): X is A and G
  MISC_FEATURE (18)..(18): X is I, L or V
XXXXXXXXXXXXXXXXXX

SEQ ID NO: 473 - protein, 16 aa, Artificial
  Completely synthesized peptide construct
  MISC_FEATURE (1)..(1): X is N or Q for amidated amino acids
  MISC_FEATURE (2)..(2): X is I, L or V
  MISC_FEATURE (3)..(3): X is F, W or Y for aromatic amino acids
  MISC_FEATURE (4)..(4): X is D and E for acidic amino acids
  MISC_FEATURE (5)..(5): X is T or S
  MISC_FEATURE (6)..(6): X is A and G
  MISC_FEATURE (7)..(7): X is C or S
  MISC_FEATURE (8)..(8): X is T or S
  MISC_FEATURE (9)..(9): X is 5-aminopentanoic acid for replacement of 3 or 4 amino acids of X2 and X3
  MISC_FEATURE (10)..(10): X is M or Nle (Norleucine)
  MISC_FEATURE (11)..(11): X is I, L or V
  MISC_FEATURE (12)..(12): X is I, L or V
  MISC_FEATURE (13)..(13): X is F or P
  MISC_FEATURE (14)..(14): X is 5-aminopentanoic acid for replacement of 3 or 4 amino acids of X2 and X3
  MISC_FEATURE (15)..(15): X is A and G
  MISC_FEATURE (16)..(16): X is I, L or V
XXXXXXXXXXXXXXXX

SEQ ID NO: 474 - protein, 17 aa, Artificial
  Completely synthesized peptide construct
  MISC_FEATURE (1)..(1): X is M or Nle (Norleucine)
  MISC_FEATURE (2)..(2): X is I, L or V
  MISC_FEATURE (3)..(3): X is F, W or Y for aromatic amino acids
  MISC_FEATURE (4)..(4): X is D and E for acidic amino acids
  MISC_FEATURE (5)..(5): X is T or S
  MISC_FEATURE (6)..(6): X is A and G
  MISC_FEATURE (7)..(7): X is C or S
  MISC_FEATURE (8)..(8): X is T or S
  MISC_FEATURE (9)..(9): X is Gaba2 for X2X3 or X3X2 or X2X3 or X3X2 or X3X3 or X2X2
  MISC_FEATURE (10)..(10): X is I, L or V
  MISC_FEATURE (11)..(11): X is M or Nle (Norleucine)
  MISC_FEATURE (12)..(12): X is Gaba2 for X2X3 or X3X2 or X2X3 or X3X2 or X3X3 or X2X2
  MISC_FEATURE (13)..(13): X is F or P
  MISC_FEATURE (14)..(14): X is Gaba2 for X2X3 or X3X2 or X2X3 or X3X2 or X3X3 or X2X2
  MISC_FEATURE (15)..(15): X is Gaba2 for X2X3 or X3X2 or X2X3 or X3X2 or X3X3 or X2X2
  MISC_FEATURE (16)..(16): X is A and G
  MISC_FEATURE (17)..(17): X is I, L or V
XXXXXXXXXXXXXXXXX

SEQ ID NO: 475 - protein, 21 aa, Artificial
  Completely synthesized peptide construct
  MISC_FEATURE (1)..(1): X is acetyl or propionyl group, D glycine or D alanine, cyclohexylalanine at amino terminus
  MISC_FEATURE (2)..(2): X is M or Nle (Norleucine)
  MISC_FEATURE (3)..(3): X is I, L or V
  MISC_FEATURE (4)..(4): X is F, W or Y for aromatic amino acids
  MISC_FEATURE (5)..(5): X is D and E for acidic amino acids
  MISC_FEATURE (6)..(6): X is T or S
  MISC_FEATURE (7)..(6): X is A and G
  misc_feature (7)..(7): Xaa can be any naturally occurring amino acid
  MISC_FEATURE (8)..(8): X is C or S
  MISC_FEATURE (9)..(9): X is T or S
  MISC_FEATURE (10)..(10): X is Gaba2 for X2X3 or X3X2 or X2X3 or X3X2 or X3X3 or X2X2
  MISC_FEATURE (11)..(11): X is I, L or V
  MISC_FEATURE (12)..(12): X is M or Nle (Norleucine)
  MISC_FEATURE (13)..(13): X is I, L or V
  MISC_FEATURE (14)..(14): X is I, L or V
  MISC_FEATURE (15)..(15): X is F or P
  MISC_FEATURE (16)..(16): X is I, L or V
  MISC_FEATURE (17)..(17): X is I, L or V
  MISC_FEATURE (18)..(18): X is D and E for acidic amino acids
  MISC_FEATURE (19)..(19): X is D and E for acidic amino acids
  MISC_FEATURE (20)..(20): X is A and G
  MISC_FEATURE (21)..(21): X is I, L or V
XXXXXXXXXXXXXXXXXXXXX

SEQ ID NO: 476 - protein, 21 aa, Artificial
  Completely synthesized peptide construct
  MISC_FEATURE (1)..(1): X is acetyl or propionyl group, D glycine or D alanine, cyclohexylalanine at amino terminus
  MISC_FEATURE (2)..(2): X is M or Nle (Norleucine)
  MISC_FEATURE (3)..(3): X is I, L or V
  MISC_FEATURE (4)..(4): X is F, W or Y for aromatic amino acids
  MISC_FEATURE (5)..(5): X is D and E for acidic amino acids
  MISC_FEATURE (6)..(6): X is T or S
  MISC_FEATURE (7)..(7): X is A and G
  MISC_FEATURE (8)..(8): X is C or S
  MISC_FEATURE (9)..(9): X is T or S
  MISC_FEATURE (10)..(10): X is I, L or V
  MISC_FEATURE (11)..(11): X is Gaba2 for X2X3 or X3X2 or X2X3 or X3X2 or X3X3 or X2X2
  MISC_FEATURE (12)..(12): X is M or Nle (Norleucine)
  MISC_FEATURE (13)..(13): X is I, L or V
  MISC_FEATURE (14)..(14): X is I, L or V
  MISC_FEATURE (15)..(15): X is F or P
  MISC_FEATURE (16)..(16): X is I, L or V
  MISC_FEATURE (17)..(17): X is I, L or V
  MISC_FEATURE (18)..(18): X is D and E for acidic amino acids
  MISC_FEATURE (19)..(19): X is D and E for acidic amino acids
  MISC_FEATURE (20)..(20): X is A and G
  MISC_FEATURE (21)..(21): X is I, L or V
XXXXXXXXXXXXXXXXXXXXX

SEQ ID NO: 477 - protein, 21 aa, Artificial
  Completely synthesized peptide construct
  MISC_FEATURE (1)..(1): X is acetyl or propionyl group, D glycine or D alanine, cyclohexylalanine at amino terminus
  MISC_FEATURE (2)..(2): X is M or Nle (Norleucine)
  MISC_FEATURE (3)..(3): X is I, L or V
  MISC_FEATURE (4)..(4): X is F, W or Y for aromatic amino acids
  MISC_FEATURE (5)..(5): X is D and E for acidic amino acids
  MISC_FEATURE (6)..(5): X is T or S
  misc_feature (6)..(6): Xaa can be any naturally occurring amino acid
  MISC_FEATURE (7)..(7): X is A and G
  MISC_FEATURE (8)..(8): X is C or S
  MISC_FEATURE (9)..(9): X is T or S
  MISC_FEATURE (10)..(10): X is I, L or V
  MISC_FEATURE (11)..(11): X is I, L or V
  MISC_FEATURE (12)..(12): X is I, L or V
  MISC_FEATURE (13)..(13): X is M or Nle (Norleucine)
  MISC_FEATURE (14)..(14): X is I, L or V
  MISC_FEATURE (15)..(15): X is I, L or V
  MISC_FEATURE (16)..(16): X is F or P
  MISC_FEATURE (17)..(17): X is I, L or V
  MISC_FEATURE (18)..(18): X is I, L or V
  MISC_FEATURE (19)..(19): X is Gaba2 for X2X3 or X3X2 or X2X3 or X3X2 or X3X3 or X2X2
  MISC_FEATURE (20)..(20): X is A and G
  MISC_FEATURE (21)..(21): X is I, L or V
XXXXXXXXXXXXXXXXXXXXX

SEQ ID NO: 478 - protein, 20 aa, Artificial
  Completely synthesized peptide construct
  MISC_FEATURE (1)..(1): X is acetyl or propionyl group, D glycine or D alanine, cyclohexylalanine at amino terminus
  MISC_FEATURE (2)..(2): X is M or Nle (Norleucine)
  MISC_FEATURE (3)..(3): X is I, L or V
  MISC_FEATURE (4)..(4): X is F, W or Y for aromatic amino acids
  MISC_FEATURE (5)..(5): X is D and E for acidic amino acids
  MISC_FEATURE (6)..(6): X is T or S
  MISC_FEATURE (7)..(7): X is A and G
  MISC_FEATURE (8)..(8): X is C or S
  MISC_FEATURE (9)..(9): X isT or S
  MISC_FEATURE (10)..(10): X is T or S
  MISC_FEATURE (10)..(10): X is 5-aminopentanoic acid for replacement of 3 or 4 amino acids of X2 and X3
  MISC_FEATURE (11)..(11): X is M or Nle (Norleucine)
  MISC_FEATURE (12)..(12): X is I, L or V
  MISC_FEATURE (13)..(13): X is I, L or V
  MISC_FEATURE (14)..(14): X is F or P
  MISC_FEATURE (15)..(15): X is I, L or V
  MISC_FEATURE (16)..(16): X is I, L or V
  MISC_FEATURE (17)..(17): X is D and E for acidic amino acids
  MISC_FEATURE (18)..(18): X is D and E for acidic amino acids
  MISC_FEATURE (19)..(19): X is A and G
  MISC_FEATURE (20)..(20): X is I, L or V
XXXXXXXXXXXXXXXXXXXX

SEQ ID NO: 479 - protein, 19 aa, Artificial
  Completely synthesized peptide construct
  MISC_FEATURE (1)..(1): X is acetyl or propionyl group, D glycine or D alanine, cyclohexylalanine at amino terminus
  MISC_FEATURE (2)..(2): X is M or Nle (Norleucine)
  MISC_FEATURE (3)..(3): X is I, L or V
  MISC_FEATURE (4)..(4): X is F, W or Y for aromatic amino acids
  MISC_FEATURE (5)..(5): X is D and E for acidic amino acids
  MISC_FEATURE (6)..(6): X is T or S
  MISC_FEATURE (7)..(7): X is A and G
  MISC_FEATURE (8)..(8): X is C or S
  MISC_FEATURE (9)..(9): X is T or S
  MISC_FEATURE (10)..(10): X is I, L or V
  MISC_FEATURE (11)..(11): X is I, L or V
  MISC_FEATURE (12)..(12): X is I, L or V
  MISC_FEATURE (13)..(13): X is M or Nle (Norleucine)
  MISC_FEATURE (14)..(14): X is I, L or V
  MISC_FEATURE (15)..(15): X is I, L or V
  MISC_FEATURE (16)..(16): X is F or P
  MISC_FEATURE (17)..(17): X is 5-aminopentanoic acid for replacement of 3 or 4 amino acids of X2 and X3
  MISC_FEATURE (18)..(18): X is A and G
  MISC_FEATURE (19)..(19): X is I, L or V
XXXXXXXXXXXXXXXXXXX

SEQ ID NO: 480 - protein, 17 aa, Artificial
  Completely synthesized peptide construct
  MISC_FEATURE (1)..(1): X is acetyl or propionyl group, D glycine or D alanine, cyclohexylalanine at amino terminus
  MISC_FEATURE (2)..(2): X is M or Nle (Norleucine)
  MISC_FEATURE (3)..(3): X is I, L or V
  MISC_FEATURE (4)..(4): X is F, W or Y for aromatic amino acids
  MISC_FEATURE (5)..(5): X is D and E for acidic amino acids
  MISC_FEATURE (6)..(6): X is T or S
  MISC_FEATURE (7)..(6): X is A and G
  misc_feature (7)..(7): Xaa can be any naturally occurring amino acid
  MISC_FEATURE (8)..(8): X is C or S
  MISC_FEATURE (9)..(9): X is T or S
  MISC_FEATURE (10)..(10): X is 5-aminopentanoic acid for replacement of 3 or 4 amino acids of X2 and X3
  MISC_FEATURE (11)..(11): X is M or Nle (Norleucine)
  MISC_FEATURE (12)..(12): X is I, L or V
  MISC_FEATURE (13)..(13): X is I, L or V
  MISC_FEATURE (14)..(14): X is F or P
  MISC_FEATURE (15)..(15): X is 5-aminopentanoic acid for replacement of 3 or 4 amino acids of X2 or X3
  MISC_FEATURE (16)..(16): X is A and G
  MISC_FEATURE (17)..(17): X is I, L or V
XXXXXXXXXXXXXXXXX

SEQ ID NO: 481 - protein, 18 aa, Artificial
  Completely synthesized peptide construct
  MISC_FEATURE (1)..(1): X is acetyl or propionyl group, D glycine or D alaninie, cyclohexylalanine at amino terminus
  MISC_FEATURE (2)..(2): X is M or Nle (Norleucine)
  MISC_FEATURE (3)..(3): X is I, L or V
  MISC_FEATURE (4)..(4): X is F, W or Y for aromatic amino acids
  MISC_FEATURE (5)..(5): X is D and E for acidic amino acids
  MISC_FEATURE (6)..(6): X is T or S
  MISC_FEATURE (7)..(7): X is A and G
  MISC_FEATURE (8)..(8): X is C or S
  MISC_FEATURE (9)..(9): X is T or S
  MISC_FEATURE (10)..(10): X is Gaba2 for X2X3 or X3X2 or X2X3 or X3X2 or X3X3 or X2X2
  MISC_FEATURE (11)..(11): X is I, L or V
  MISC_FEATURE (12)..(12): X is M or Nle (Norleucine)
  MISC_FEATURE (13)..(13): X is A and G
  MISC_FEATURE (14)..(14): X is F or P
  MISC_FEATURE (15)..(15): X is Gaba2 for X2X3 or X3X2 or X2X3 or X3X2 or X3X3 or X2X2
  MISC_FEATURE (16)..(16): X is Gaba2 for X2X3 or X3X2 or X2X3 or X3X2 or X3X3 or X2X2
  MISC_FEATURE (17)..(17): X is A and G
  MISC_FEATURE (18)..(18): X is I, L or V
XXXXXXXXXXXXXXXXXX

SEQ ID NO: 482 - protein, 19 aa, Artificial
  Completely synthesized peptide construct
FYLKNVQTQETRTLTQFHF

SEQ ID NO: 483 - protein, 19 aa, Artificial
  Completely synthesized peptide construct
  MISC_FEATURE (1)..(1): X is F or P
  MISC_FEATURE (2)..(2): X is F, W or Y for aromatic amino acids
  MISC_FEATURE (3)..(3): X is I, L or V
  MISC_FEATURE (4)..(4): X is K, R or H for basic amino acids
  MISC_FEATURE (5)..(5): X is N or Q for amidated amino acids
  MISC_FEATURE (6)..(6): X is I, L or V
  MISC_FEATURE (7)..(7): X is N or Q for amidated amino acids
  MISC_FEATURE (8)..(8): X is T or S
  MISC_FEATURE (9)..(9): X is N or Q for amidated amino acids
  MISC_FEATURE (10)..(10): X is for D and E for acidic amino acids
  MISC_FEATURE (11)..(11): X is I, L or V
  MISC_FEATURE (12)..(12): X is K, R or H for basic amino acids
  MISC_FEATURE (13)..(13): X is T or S
  MISC_FEATURE (14)..(14): X is I, L or V
  MISC_FEATURE (15)..(15): X is T or S
  MISC_FEATURE (16)..(16): X is N or Q for amidated amino acids
  MISC_FEATURE (17)..(17): X is F or P
  MISC_FEATURE (18)..(18): X is K, R or H for basic amino acids
  MISC_FEATURE (19)..(19): X is F, W or Y for aromatic amino acids
XXXXXXXXXXXXXXXXXXX

SEQ ID NO: 484 - protein, 20 aa, Artificial
  Completely synthesized peptide construct
  MISC_FEATURE (1)..(1): X is acetyl or propionyl group, D glycine or D alanine, cyclohexylalanine at amino terminus
  MISC_FEATURE (2)..(2): X is F or P
  MISC_FEATURE (3)..(3): X is F, W or Y for aromatic amino acids
  MISC_FEATURE (4)..(4): X is I, L or V
  MISC_FEATURE (5)..(5): X is K, R or H for basic amino acids
  MISC_FEATURE (6)..(6): X is N or Q for amidated amino acids
  MISC_FEATURE (7)..(7): X is I, L or V
  MISC_FEATURE (8)..(8): X is N or Q for amidated amino acids
  MISC_FEATURE (9)..(9): X is T or S
  MISC_FEATURE (10)..(10): X is N or Q for amidated amino acids
  MISC_FEATURE (11)..(11): X is D and E for acidic amino acids
  MISC_FEATURE (12)..(12): X is I, L or V
  MISC_FEATURE (13)..(13): X is K, R or H for basic amino acids
  MISC_FEATURE (14)..(14): X is T or S
  MISC_FEATURE (15)..(15): X is I, L or V
  MISC_FEATURE (16)..(16): X is T or S
  MISC_FEATURE (17)..(17): X is N or Q for amidated amino acids
  MISC_FEATURE (18)..(18): X is F or P
  MISC_FEATURE (19)..(19): X is K, R or H for basic amino acids
  MISC_FEATURE (20)..(20): X is F, W or Y for aromatic amino acids
XXXXXXXXXXXXXXXXXXXX

SEQ ID NO: 485 - protein, 18 aa, Artificial
  Completely synthesized peptide construct
  MISC_FEATURE (1)..(1): X is F or P
  MISC_FEATURE (2)..(2): X is F, W or Y for aromatic amino acids
  MISC_FEATURE (3)..(3): X is I, L or V
  MISC_FEATURE (4)..(4): X is K, R or H for basic amino acids
  MISC_FEATURE (5)..(5): X is N or Q for amidated amino acids
  MISC_FEATURE (6)..(6): X is I, L or V
  MISC_FEATURE (7)..(7): X is N or Q for amidated amino acids
  MISC_FEATURE (8)..(8): X is T or S
  MISC_FEATURE (9)..(9): X is N or Q for amidated amino acids
  MISC_FEATURE (10)..(10)
  MISC_FEATURE (10)..(10): X is Gaba2 for X2X3 or X3X2 or X2X3 or X3X2 or X3X3 or X2X2
  MISC_FEATURE (11)..(11): X is K, R or H for basic amino acids
  MISC_FEATURE (12)..(12): X is T or S
  MISC_FEATURE (13)..(13): X is T or S
  MISC_FEATURE (14)..(14): X is T or S
  MISC_FEATURE (15)..(15): X is N or Q for amidated amino acids
  MISC_FEATURE (16)..(16): X is F or P
  MISC_FEATURE (17)..(17): X is K, R or H for basic amino acids
  MISC_FEATURE (18)..(18): X is F, W or Y for aromatic amino acids
XXXXXXXXXXXXXXXXXX

SEQ ID NO: 486 - protein, 19 aa, Artificial
  Completely synthesized peptide construct
  MISC_FEATURE (1)..(1): X is acetyl or propionyl group, D glycine or D alanine, cyclohexylalanine at amino terminus
  MISC_FEATURE (2)..(2): X is F or P
  MISC_FEATURE (3)..(3): X is F, W or Y for aromatic amino acids
  MISC_FEATURE (4)..(4): X is I, L or V
  MISC_FEATURE (5)..(5): X is K, R or H for basic amino acids
  MISC_FEATURE (6)..(6): X is N or Q for amidated amino acids
  MISC_FEATURE (7)..(7): X is I, L or V
  MISC_FEATURE (8)..(8): X is N or Q for amidated amino acids
  MISC_FEATURE (9)..(9): X is T or S
  MISC_FEATURE (10)..(10): X is N or Q for amidated amino acids
  MISC_FEATURE (11)..(11): X is GabaX for X2X3 or X3X2 or X2X3 or X3X2 or X3X3 or X2X2
  MISC_FEATURE (12)..(12): X is K, R or H for basic amino acids
  MISC_FEATURE (13)..(13): X is T or S
  MISC_FEATURE (14)..(14): X is I, L or V
  MISC_FEATURE (15)..(15): X is T or S
  MISC_FEATURE (16)..(16): X is N or Q for amidated amino acids
  MISC_FEATURE (17)..(17): X is F or P
  MISC_FEATURE (18)..(18): X is K, R or H for basic amino acids
  MISC_FEATURE (19)..(19): X is F, W or Y for aromatic amino acids
XXXXXXXXXXXXXXXXXXX

SEQ ID NO: 487 - protein, 20 aa, Artificial
  Completely synthesized peptide construct
DGEAGKPGKAGERGPPGPQG

SEQ ID NO: 488 - protein, 20 aa, Artificial
  Completely synthesized peptide construct
  MISC_FEATURE (1)..(1): X is D and E for acidic amino acids
  MISC_FEATURE (2)..(2): X is A and G
  MISC_FEATURE (3)..(3): X is D and E for acidic amino acids
  MISC_FEATURE (4)..(4): X is A and G
  MISC_FEATURE (5)..(5): X is A and G
  MISC_FEATURE (6)..(6): X is K, R or H for basic amino acids
  MISC_FEATURE (7)..(7): X is F or P
  MISC_FEATURE (8)..(8): X is A and G
  MISC_FEATURE (9)..(9): X is K, R or H for basic amino acids
  MISC_FEATURE (10)..(10): X is A and G
  MISC_FEATURE (11)..(11): X is A and G
  MISC_FEATURE (12)..(12): X is D and E for acidic amino acids
  MISC_FEATURE (13)..(13): X is K, R or H for basic amino acids
  MISC_FEATURE (14)..(14): X is A and G
  MISC_FEATURE (15)..(15): X is F or P
  MISC_FEATURE (16)..(16): X is F or P
  MISC_FEATURE (17)..(17): X is A and G
  MISC_FEATURE (18)..(18): X is F or P
  MISC_FEATURE (19)..(19): X is N or Q for amidated amino acids
  MISC_FEATURE (20)..(20): X is A and G
XXXXXXXXXXXXXXXXXXXX

SEQ ID NO: 489 - protein, 21 aa, Artificial
  Completely synthesized peptide construct
  MISC_FEATURE (1)..(1): X is acetyl or propionyl group, D glycine or D alanine, cyclohexylalanine at amino terminus
  MISC_FEATURE (2)..(2): X is D and E for acidic amino acids
  MISC_FEATURE (3)..(3): X is A and G
  MISC_FEATURE (4)..(4): X is D and E for acidic amino acids
  MISC_FEATURE (5)..(5): X is A and G
  MISC_FEATURE (6)..(6): X is A and G
  MISC_FEATURE (7)..(7): X is K, R or H for basic amino acids
  MISC_FEATURE (8)..(8): X is A and G
  MISC_FEATURE (9)..(9): X is K, R or H for basic amino acids
  MISC_FEATURE (10)..(10): X is K, R or H for basic amino acids
  MISC_FEATURE (11)..(11): X is A and G
  MISC_FEATURE (12)..(12): X is A and G
  MISC_FEATURE (13)..(13): X is D and E for acidic amino acids
  MISC_FEATURE (14)..(14): X is K, R or H for basic amino acids
  MISC_FEATURE (15)..(15): X is A and G
  MISC_FEATURE (16)..(16): X is F or P
  MISC_FEATURE (17)..(17): X is F or P
  MISC_FEATURE (18)..(18): X is A and G
  MISC_FEATURE (19)..(19): X is F or P
  MISC_FEATURE (20)..(20): X is N or Q for amidated amino acids
  MISC_FEATURE (21)..(21): X is A and G
XXXXXXXXXXXXXXXXXXXXX

SEQ ID NO: 490 - protein, 20 aa, Artificial
  Completely synthesized peptide construct
GLDGAKGEAGAPGVKGESGS

SEQ ID NO: 491 - protein, 21 aa, Artificial
  Completely synthesized peptide construct
  MISC_FEATURE (1)..(1): X is A and G
  MISC_FEATURE (2)..(2): X is I, L or V
  MISC_FEATURE (3)..(3): X is D and E for acidic amino acids
  MISC_FEATURE (4)..(4): X is A and G
  MISC_FEATURE (5)..(5): X is A and G
  MISC_FEATURE (6)..(6): X is K, R or H for basic amino acids
  MISC_FEATURE (7)..(7): X is A and G
  MISC_FEATURE (8)..(8): X is D and E for acidic amino acids
  MISC_FEATURE (9)..(9): X is A and G
  MISC_FEATURE (10)..(10): X is A and G
  MISC_FEATURE (11)..(11): X is A and G
  MISC_FEATURE (12)..(12): X is F or P
  MISC_FEATURE (13)..(13): X is A and G
  MISC_FEATURE (14)..(14): X is I, L or V
  MISC_FEATURE (15)..(15): X is K, R or H for basic amino acids
  MISC_FEATURE (16)..(16): X is A and G
  MISC_FEATURE (17)..(17): X is D and E for acidic amino acids
  MISC_FEATURE (18)..(18): X is T or S
  MISC_FEATURE (19)..(19): X is A and G
  MISC_FEATURE (20)..(20): X is A and G
  MISC_FEATURE (21)..(21): X is T or S
XXXXXXXXXXXXXXXXXXXXX

SEQ ID NO: 492 - protein, 21 aa, Artificial
  Completely synthesized peptide construct
  MISC_FEATURE (1)..(1): X is acetyl or propionyl group, D glycine or D alanine, cyclohexylalanine at amino terminus
  MISC_FEATURE (2)..(2): X is A and G
  MISC_FEATURE (3)..(3): X is I, L or V
  MISC_FEATURE (4)..(4): X is D and E for acidic amino acids
  MISC_FEATURE (5)..(5): X is A and G
  MISC_FEATURE (6)..(6): X is A and G
  MISC_FEATURE (7)..(7): X is K, R or H for basic amino acids
  MISC_FEATURE (8)..(8): X is A and G
  MISC_FEATURE (9)..(9): X is D and E for acidic amino acids
  MISC_FEATURE (10)..(10): X is A and G
  MISC_FEATURE (11)..(11): X is A and G
  MISC_FEATURE (12)..(12): X is A and G
  MISC_FEATURE (13)..(13): X is F or P
  MISC_FEATURE (14)..(14): X is A and G
  MISC_FEATURE (15)..(15): X is I, L or V
  MISC_FEATURE (16)..(16): X is K, R or H for basic amino acids
  MISC_FEATURE (17)..(17): X is A and G
  MISC_FEATURE (18)..(18): X is D and E for acidic amino acids
  MISC_FEATURE (19)..(19): X is T or S
  MISC_FEATURE (20)..(20): X is A and G
  MISC_FEATURE (21)..(21): X is T or S
XXXXXXXXXXXXXXXXXXXXX

SEQ ID NO: 493 - protein, 19 aa, Artificial
  Completely synthesized peptide construct
  MISC_FEATURE (1)..(1): X is A and G
  MISC_FEATURE (2)..(2): X is GabaX for X2X3 or X3X2 or X2X3 or X3X2 or X3X3 or X2X2
  MISC_FEATURE (3)..(3): X is A and G
  MISC_FEATURE (4)..(4): X is A and G
  MISC_FEATURE (5)..(5): X is K, R or H for basic amino acids
  MISC_FEATURE (6)..(6): X is A and G
  MISC_FEATURE (7)..(7): X is D and E for acidic amino acids
  MISC_FEATURE (8)..(8): X is A and G
  MISC_FEATURE (9)..(9): X is A and G
  MISC_FEATURE (10)..(10): X is A and G
  MISC_FEATURE (11)..(11): X is F or P
  MISC_FEATURE (12)..(12): X is A and G
  MISC_FEATURE (13)..(13): X is I, L or V
  MISC_FEATURE (14)..(14): X is K, R or H for basic amino acids
  MISC_FEATURE (15)..(15): X is A and G
  MISC_FEATURE (16)..(16): X is D and E for acidic amino acids
  MISC_FEATURE (17)..(17): X is T or S
  MISC_FEATURE (18)..(18): X is A and G
  MISC_FEATURE (19)..(19): X is T or S
XXXXXXXXXXXXXXXXXXX

SEQ ID NO: 494 - protein, 20 aa, Artificial
  Completely synthesized peptide construct
  MISC_FEATURE (1)..(1): X is acetyl or propionyl group, D glycine or D alanine, cyclohexylalanine at amino terminus
  MISC_FEATURE (2)..(2): X is A and G
  MISC_FEATURE (3)..(3): X is GabaX for X2X3 or X3X2 or X2X3 or X3X2 or X3X3 or X2X2
  MISC_FEATURE (4)..(4): X is A and G
  MISC_FEATURE (5)..(5): X is A and G
  MISC_FEATURE (6)..(6): X is K, R or H for basic amino acids
  MISC_FEATURE (7)..(7): X is A and G
  MISC_FEATURE (8)..(8): X is D and E for acidic amino acids
  MISC_FEATURE (9)..(9): X is A and G
  MISC_FEATURE (10)..(10): X is A and G
  MISC_FEATURE (11)..(11): X is A and G
  MISC_FEATURE (12)..(12): X is F or P
  MISC_FEATURE (13)..(13): X is A and G
  MISC_FEATURE (14)..(14): X is I, L or V
  MISC_FEATURE (15)..(15): X is K, R or H for basic amino acids
  MISC_FEATURE (16)..(16): X is A and G
  MISC_FEATURE (17)..(17): X is D and E for acidic amino acids
  MISC_FEATURE (18)..(18): X is T or S
  MISC_FEATURE (19)..(19): X is A and G
  MISC_FEATURE (20)..(20): X is T or S
XXXXXXXXXXXXXXXXXXXX

SEQ ID NO: 495 - protein, 20 aa, Artificial
  Completely synthesized peptide construct
ERGAAGIAGDKGDRGDVGEK

SEQ ID NO: 496 - protein, 20 aa, Artificial
  Completely synthesized peptide construct
  MISC_FEATURE (1)..(1): X is D and E for acidic amino acids
  MISC_FEATURE (2)..(2): X is K, R or H for basic amino acids
  MISC_FEATURE (3)..(3): X is A and G
  MISC_FEATURE (4)..(4): X is A and G
  MISC_FEATURE (5)..(5): X is A and G
  MISC_FEATURE (6)..(6): X is A and G
  MISC_FEATURE (7)..(7): X is I, L or V
  MISC_FEATURE (8)..(8): X is A and G
  MISC_FEATURE (9)..(9): X is A and G
  MISC_FEATURE (10)..(10): X is D and E for acidic amino acids
  MISC_FEATURE (11)..(11): X is K, R or H for basic amino acids
  MISC_FEATURE (12)..(12): X is A and G
  MISC_FEATURE (13)..(13): X is D and E for acidic amino acids
  MISC_FEATURE (14)..(14): A is K, R or H for basic amino acids
  MISC_FEATURE (15)..(15): X is A and G
  MISC_FEATURE (16)..(16): X is D and E for acidic amino acids
  MISC_FEATURE (17)..(17): X is I, L or V
  MISC_FEATURE (18)..(18): X is A and G
  MISC_FEATURE (19)..(19): X is D and E for acidic amino acids
  MISC_FEATURE (20)..(20): X is K, R or H for basic amino acids
XXXXXXXXXXXXXXXXXXXX

SEQ ID NO: 497 - protein, 21 aa, Artificial
  Completely synthesized peptide construct
  MISC_FEATURE (1)..(1): X is acetyl or propionyl group, D glycine or D alanine, cyclohexylalanine at amino terminus
  MISC_FEATURE (2)..(2): X is D and E for acidic amino acids
  MISC_FEATURE (3)..(3): X is K, R or H for basic amino acids
  MISC_FEATURE (4)..(4): X is A and G
  MISC_FEATURE (5)..(5): X is A and G
  MISC_FEATURE (6)..(6): X is A and G
  MISC_FEATURE (7)..(7): X is A and G
  MISC_FEATURE (8)..(8): X is I, L or V
  MISC_FEATURE (9)..(9): X is A and G
  MISC_FEATURE (10)..(10): X is A and G
  MISC_FEATURE (11)..(11): X is D and E for acidic amino acids
  MISC_FEATURE (12)..(12): X is K, R or H for basic amino acids
  MISC_FEATURE (13)..(13): X is D and E for acidic amino acids
  MISC_FEATURE (14)..(14): X is K, R or H for basic amino acids
  MISC_FEATURE (15)..(15): X is A and G
  MISC_FEATURE (16)..(16): X is D and E for acidic amino acids
  MISC_FEATURE (17)..(17): X is I, L or V
  MISC_FEATURE (18)..(18): X is A and G
  MISC_FEATURE (19)..(19): X is A and G
  MISC_FEATURE (20)..(20): X is D and E for acidic amino acids
  MISC_FEATURE (21)..(21): X is K, R or H for basic amino acids
XXXXXXXXXXXXXXXXXXXXX

SEQ ID NO: 498 - protein, 19 aa, Artificial
  Completely synthesized peptide construct
  MISC_FEATURE (1)..(1): X is D and E for acidic amino acids
  MISC_FEATURE (2)..(2): X is K, R or H for basic amino acids
  MISC_FEATURE (3)..(3): X is A and G
  MISC_FEATURE (4)..(4): X is A and G
  MISC_FEATURE (5)..(5): X is A and G
  MISC_FEATURE (6)..(6): X is A and G
  MISC_FEATURE (7)..(7): X is I, L or V
  MISC_FEATURE (8)..(8): X is A and G
  MISC_FEATURE (9)..(9): X is A and G
  MISC_FEATURE (10)..(10): X is D and E for acidic amino acids
  MISC_FEATURE (11)..(11): X is K, R or H for basic amino acids
  MISC_FEATURE (12)..(12): X is A and G
  MISC_FEATURE (13)..(13): X is D and E for acidic amino acids
  MISC_FEATURE (14)..(14): X is K. R or H for basic amino acids
  MISC_FEATURE (15)..(15): X is A and G
  MISC_FEATURE (16)..(16): X is GabaX for X2X3 or X3X2 or X2X3 or X3X2 or X3X3 or X2X2
  MISC_FEATURE (17)..(17): X is A and G
  MISC_FEATURE (18)..(18): X is D and E for acidic amino acids
  MISC_FEATURE (19)..(19): X is K, R or H for basic amino acids
XXXXXXXXXXXXXXXXXXX

SEQ ID NO: 499 - protein, 20 aa, Artificial
  Completely synthesized peptide construct
  MISC_FEATURE (1)..(1): X is acetyl or propionyl group, D glycine or D alanine, cyclohexylalanine at amino terminus
  MISC_FEATURE (2)..(2): X is D and E for acidic amino acids
  MISC_FEATURE (3)..(3): X is K, R or H for basic amino acids
  MISC_FEATURE (4)..(4): X is A and G
  MISC_FEATURE (5)..(5): X is A and G
  MISC_FEATURE (6)..(6): X is A and G
  MISC_FEATURE (7)..(7): X is A and G
  MISC_FEATURE (8)..(8): X is I, L or V
  MISC_FEATURE (9)..(9): X is A and G
  MISC_FEATURE (10)..(10): X is A and G
  MISC_FEATURE (11)..(11): X is D and E for acidic amino acids
  MISC_FEATURE (12)..(12): X is K, R or H for basic amino acids
  MISC_FEATURE (13)..(13): X is A and G
  MISC_FEATURE (14)..(14): X is D and E for acidic amino acids
  MISC_FEATURE (15)..(15): X is K, R or H for basic amino acids
  MISC_FEATURE (16)..(16): X is A and G
  MISC_FEATURE (17)..(17): X is GabaX for X2X3 or X3X2 or X2X3 or X3X2 or X3X3 or X2X2
  MISC_FEATURE (18)..(18): X is A and G
  MISC_FEATURE (19)..(19): X is D and E for acidic amino acids
  MISC_FEATURE (20)..(20): X is K, R or H for basic amino acids
XXXXXXXXXXXXXXXXXXXX

SEQ ID NO: 500 - protein, 7 aa, Artificial
  Completely synthesized peptide construct
SLAYGLR

SEQ ID NO: 501 - protein, 7 aa, Artificial
  Completely synthesized peptide construct
  MISC_FEATURE (1)..(1): X is T or S
  MISC_FEATURE (2)..(2): X is I, L or V
  MISC_FEATURE (3)..(3): X is A and G
  MISC_FEATURE (4)..(4): X is F, W or Y for aromatic amino acids
  MISC_FEATURE (5)..(5): X is A and G
  MISC_FEATURE (6)..(6): X is I, L or V
  MISC_FEATURE (7)..(7): X is K, R or H for basic amino acids
XXXXXXX

SEQ ID NO: 502 - protein, 8 aa, Artificial
  Completely synthesized peptide construct
  MISC_FEATURE (1)..(1): X is acetyl or propionyl group, D glycine or D alanine, cyclohexylalanine at amino terminus
  MISC_FEATURE (2)..(2): X is T or S
  MISC_FEATURE (3)..(3): X is I, L or V
  MISC_FEATURE (4)..(4): X is A and G
  MISC_FEATURE (5)..(5): X is F, W or Y for aromatic amino acids
  MISC_FEATURE (6)..(6): X is A and G
  MISC_FEATURE (7)..(7): X is I, L or V
  MISC_FEATURE (8)..(8): X is K, R or H for basic amino acids
XXXXXXXX

SEQ ID NO: 503 - protein, 15 aa, Artificial
  Completely synthesized peptide construct
QKRAAYKQYGHAAFE

SEQ ID NO: 504 - protein, 15 aa, Artificial
  Completely synthesized peptide construct
  MISC_FEATURE (1)..(1): X is N or Q for amidated amino acids
  MISC_FEATURE (2)..(2): X is K, R or H for basic amino acids
  MISC_FEATURE (3)..(3): X is K, R or H for basic amino acids
  MISC_FEATURE (4)..(4): X is A and G
  MISC_FEATURE (5)..(5): X is A and G
  MISC_FEATURE (6)..(6): X is F, W or Y for aromatic amino acids
  MISC_FEATURE (7)..(7): X is K, R or H for basic amino acids
  MISC_FEATURE (8)..(8): X is N or Q for amidated amino acids
  MISC_FEATURE (9)..(9): X is F, W or Y for aromatic amino acids
  MISC_FEATURE (10)..(10): X is A and G
  MISC_FEATURE (11)..(11): X is K, R or H for basic amino acids
  MISC_FEATURE (12)..(12): X is A and G
  MISC_FEATURE (13)..(13): X is A and G
  MISC_FEATURE (14)..(14): X is F or P
  MISC_FEATURE (15)..(15): X is D and E for acidic amino acids
XXXXXXXXXXXXXXX

SEQ ID NO: 505 - protein, 16 aa, Artificial
  Completely synthesized peptide construct
  MISC_FEATURE (1)..(1): X is aceytl or propionyl group, D glycine or D alanine, cyclohexylalanine at amino terminus
  MISC_FEATURE (2)..(2): X is N or Q for amidated amino acids
  MISC_FEATURE (3)..(3): X is K, R or H for basic amino acids
  MISC_FEATURE (4)..(4): X is K, R or H for basic amino acids
  MISC_FEATURE (5)..(5): X A and G
  MISC_FEATURE (6)..(6): X A and G
  MISC_FEATURE (7)..(7): X is F, W or Y for aromatic amino acids
  MISC_FEATURE (8)..(8): X is K, R or H for basic amino acids
  MISC_FEATURE (9)..(9): X is N or Q for amidated amino acids
  MISC_FEATURE (10)..(10): X is F, W or Y for aromatic amino acids
  MISC_FEATURE (11)..(11): X is A and G
  MISC_FEATURE (12)..(12): X is K, R or H for basic amino acids
  MISC_FEATURE (13)..(13): X is A and G
  MISC_FEATURE (14)..(14): X is A and G
  MISC_FEATURE (15)..(15): X is F or P
  MISC_FEATURE (16)..(16): X is D and E for acidic amino acids
XXXXXXXXXXXXXXXX

SEQ ID NO: 506 - protein, 14 aa, Artificial
  Completely synthesized peptide construct
ERAAYDQYGHAAFE

SEQ ID NO: 507 - protein, 14 aa, Artificial
  Completely synthesized peptide construct
  MISC_FEATURE (1)..(1): X is D and E for acidic amino acids
  MISC_FEATURE (2)..(2): X is K, R or H for basic amino acids
  MISC_FEATURE (3)..(3): X is A and G
  MISC_FEATURE (4)..(4): X is A and G
  MISC_FEATURE (5)..(5): X is F, W or Y for aromatic amino acids
  MISC_FEATURE (6)..(6): X is D and E for acidic amino acids
  MISC_FEATURE (7)..(7): X is N or Q for amidated amino acids
  MISC_FEATURE (8)..(8): X is F, W or Y for aromatic amino acids
  MISC_FEATURE (9)..(9): X is A and G
  MISC_FEATURE (10)..(10): X is K, R or H for basic amino acids
  MISC_FEATURE (11)..(11): X is A and G
  MISC_FEATURE (12)..(12): X is A and G
  MISC_FEATURE (13)..(13): X is F or P
  MISC_FEATURE (14)..(14): X is D and E for acidic amino acids
XXXXXXXXXXXXXX

SEQ ID NO: 508 - protein, 15 aa, Artificial
  Completely synthesized peptide construct
  MISC_FEATURE (1)..(1): X is acetyl or propionyl group, D glycine or D alanine, cyclohexylalanine at amino terminus
  MISC_FEATURE (2)..(2): X is D and E for acidic amino acids
  MISC_FEATURE (3)..(3): X is K, R or H for basic amino acids
  MISC_FEATURE (4)..(4): X is A and G
  MISC_FEATURE (5)..(5): X is A and G
  MISC_FEATURE (6)..(6): X is F, W or Y for aromatic amino acids
  MISC_FEATURE (7)..(7): X is D and E for acidic amino acids
  MISC_FEATURE (8)..(8): X is N or Q for amidated amino acids
  MISC_FEATURE (9)..(9): X is F, W or Y for aromatic amino acids
  MISC_FEATURE (10)..(10): X is A and G
  MISC_FEATURE (11)..(11): X is K, R or H for basic amino acids
  MISC_FEATURE (12)..(12): X is A and G
  MISC_FEATURE (13)..(13): X is A and G
  MISC_FEATURE (14)..(14): X is F or P
  MISC_FEATURE (15)..(15): X is A and G
XXXXXXXXXXXXXXX

SEQ ID NO: 509 - protein, 17 aa, Artificial
  Completely synthesized peptide construct
SVKLSIAVKNKAEFHQS

SEQ ID NO: 510 - protein, 17 aa, Artificial
  Completely synthesized peptide construct
  MISC_FEATURE (1)..(1): X is T or S
  MISC_FEATURE (2)..(2): X is I, L or V
  MISC_FEATURE (3)..(3): X is K, R or H for basic amino acids
  MISC_FEATURE (4)..(4): X is I, L or V
  MISC_FEATURE (5)..(5): X is T or S
  MISC_FEATURE (6)..(6): X is I, L or V
  MISC_FEATURE (7)..(7): X is A and G
  MISC_FEATURE (8)..(8): X is I, L or V
  MISC_FEATURE (9)..(9): X is K, R or H for basic amino acids
  MISC_FEATURE (10)..(10): X is N or Q for amidated amino acids
  MISC_FEATURE (11)..(11): X is K, R or H for basic amino acids
  MISC_FEATURE (12)..(12): X is A and G
  MISC_FEATURE (13)..(13): X is D and E for acidic amino acids
  MISC_FEATURE (14)..(14): X is F or P
  MISC_FEATURE (15)..(15): X is K, R or H for basic amino acids
  MISC_FEATURE (16)..(16): X is N or Q for amidated amino acids
  MISC_FEATURE (17)..(17): X is T or S
XXXXXXXXXXXXXXXXX

SEQ ID NO: 511 - protein, 18 aa, Artificial
  Completely synthesized peptide construct
  MISC_FEATURE (1)..(1): X is acetyl or propionyl group, D glycine or D alanine, cyclohexylalanine at amino terminus
  MISC_FEATURE (2)..(2): X is T or S
  MISC_FEATURE (3)..(3): X is I, L or V
  MISC_FEATURE (4)..(4): X is K, R or H for basic amino acids
  MISC_FEATURE (5)..(5): X is I, L or V
  MISC_FEATURE (6)..(6): X is T or S
  MISC_FEATURE (7)..(7): X is I, L or V
  MISC_FEATURE (8)..(8): X is A and G
  MISC_FEATURE (9)..(9): X is I, L or V
  MISC_FEATURE (10)..(10): X is K, R or H for basic amino acids
  MISC_FEATURE (11)..(11): X is N or Q for amidated amino acids
  MISC_FEATURE (12)..(12): X is K, R or H for basic amino acids
  MISC_FEATURE (13)..(13): X is A and G
  MISC_FEATURE (14)..(14): X is D and E for acidic amino acids
  MISC_FEATURE (15)..(15): X is F or P
  MISC_FEATURE (16)..(16): X is K, R or H for basic amino acids
  MISC_FEATURE (17)..(17): X is N or Q for amidated amino acids
  MISC_FEATURE (18)..(18): X is T or S
XXXXXXXXXXXXXXXXXX

SEQ ID NO: 512 - protein, 17 aa, Artificial
  Completely synthesized peptide construct
NVREGIAFRPASKTFTV

SEQ ID NO: 513 - protein, 17 aa, Artificial
  Completely synthesized peptide construct
  MISC_FEATURE (1)..(1): X is N or Q for amidated amino acids
  MISC_FEATURE (2)..(2): X is I, L or V
  MISC_FEATURE (3)..(3): X is K, R or H for basic amino acids
  MISC_FEATURE (4)..(4): X is D and E for acidic amino acids
  MISC_FEATURE (5)..(5): X is A and G
  MISC_FEATURE (6)..(5): X is I, L or V
  misc_feature (6)..(6): Xaa can be any naturally occurring amino acid
  MISC_FEATURE (7)..(7): X is A and G
  MISC_FEATURE (8)..(8): X is F or P
  MISC_FEATURE (9)..(9): X is K, R or H for basic amino acids
  MISC_FEATURE (10)..(10): X is F or P
  MISC_FEATURE (11)..(11): X is A and G
  MISC_FEATURE (12)..(12): X is T or S
  MISC_FEATURE (13)..(13): X is K, R or H for basic amino acids
  MISC_FEATURE (14)..(14): X is T or S
  MISC_FEATURE (15)..(15): X is F or P
  MISC_FEATURE (16)..(16): X is T or S
  MISC_FEATURE (17)..(17): X is I, L or V
XXXXXXXXXXXXXXXXX

SEQ ID NO: 514 - protein, 18 aa, Artificial
  Completely synthesized peptide construct
  MISC_FEATURE (1)..(1): X is aceytl or propionyl group, D glycine or D alanine, cyclohexylalanine at amino terminus
  MISC_FEATURE (2)..(2): X is N or Q for amidated amino acids
  MISC_FEATURE (3)..(3): X is I, L or V
  MISC_FEATURE (4)..(4): X is K, R or H for basic amino acids
  MISC_FEATURE (5)..(5): X is D and E for acidic amino acids
  MISC_FEATURE (6)..(6): X is A and G
  MISC_FEATURE (7)..(7): X is I, L or V
  MISC_FEATURE (8)..(8): X is A and G
  MISC_FEATURE (9)..(9): X is F or P
  MISC_FEATURE (10)..(10): X is K, R or H for basic amino acids
  MISC_FEATURE (11)..(11): X is F or P
  MISC_FEATURE (12)..(12): X is A and G
  MISC_FEATURE (13)..(13): X is T or S
  MISC_FEATURE (14)..(14): X is K, R or H for basic amino acids
  MISC_FEATURE (15)..(15): X is T or S
  MISC_FEATURE (16)..(16): X is F or P
  MISC_FEATURE (17)..(17): X is T or S
  MISC_FEATURE (18)..(18): X is I, L or V
XXXXXXXXXXXXXXXXXX

SEQ ID NO: 515 - protein, 14 aa, Artificial
  Completely synthesized peptide construct
  misc_feature (2)..(2): Xaa can be any naturally occurring amino acid
  misc_feature (9)..(9): Xaa can be any naturally occurring amino acid
EXIKFAAAXREGED

SEQ ID NO: 516 - protein, 14 aa, Artificial
  Completely synthesized peptide construct
  MISC_FEATURE (1)..(1): X is D and E for acidic amino acids
  MISC_FEATURE (2)..(2): X is A and G; D and E for acidic amino acids; I, L or V; K, R or H for basic amino acids; C or S; F, W or Y for aromatic amino acids; F or P; M or Nle (Norleucine); N or Q for amidated amino acids; and T or S
  MISC_FEATURE (3)..(3): X is I, L or V
  MISC_FEATURE (4)..(4): X is K, R or H for basic amino acids
  MISC_FEATURE (5)..(5): X is F or P
  MISC_FEATURE (6)..(6): X is A and G
  MISC_FEATURE (7)..(7): X is A and G
  MISC_FEATURE (8)..(8): X is A and G
  MISC_FEATURE (9)..(9): X is
  MISC_FEATURE (10)..(10): X is K, R or H for basic amino acids
  MISC_FEATURE (11)..(11): X is D and E for acidic amino acids
  MISC_FEATURE (12)..(12): X is A and G
  MISC_FEATURE (13)..(13): X is D and E for acidic amino acids
  MISC_FEATURE (14)..(14): X is D and E for acidic amino acids
XXXXXXXXXXXXXX

SEQ ID NO: 517 - protein, 15 aa, Artificial
  Completely synthesized peptide construct
  MISC_FEATURE (1)..(1): X is acetyl or propionyl group, D glycine or D alanine, cyclohexylalanine at amino terminus
  MISC_FEATURE (2)..(2): X is D and E for acidic amino acids
  MISC_FEATURE (3)..(3): X is A and G; D and E for acidic amino acids; I, L or V; K, R or H for basic amino acids; C or S; F, W or Y for aromatic amino acids; F or P; M or Nle (Norleucine); N or Q for amidated amino acids; and T or S
  MISC_FEATURE (4)..(4): X is I, L or V
  MISC_FEATURE (5)..(5): X is K, R or H for basic amino acids
  MISC_FEATURE (6)..(6): X is F or P
  MISC_FEATURE (7)..(7): X is A and G
  MISC_FEATURE (8)..(8): X is A and G
  MISC_FEATURE (9)..(9): X is A and G
  MISC_FEATURE (10)..(10): X is
  MISC_FEATURE (11)..(11): X is K, R or H for basic amino acids
  MISC_FEATURE (12)..(12): X is A and G
  MISC_FEATURE (13)..(13): X is A and G
  MISC_FEATURE (14)..(14): X is D and E for acidic amino acids
  MISC_FEATURE (15)..(15): X is D and E for acidic amino acids
XXXXXXXXXXXXXXX

SEQ ID NO: 518 - protein, 12 aa, Artificial
  Completely synthesized peptide construct
  MISC_FEATURE (1)..(1): X is GabaX for X2X3 or X3X2 or X2X3 or X3X2 or X3X3 or X2X2
  MISC_FEATURE (2)..(2): X is K, R or H for basic amino acids
  MISC_FEATURE (3)..(3): X is F or P
  MISC_FEATURE (4)..(4): X is A and G
  MISC_FEATURE (5)..(5): X is A and G
  MISC_FEATURE (6)..(6): X is A and G
  MISC_FEATURE (7)..(6): X is A and G; D and E for acidic amino acids; I, L or V; K, R or H for basic amino acids; C or S; F, W or Y for aromatic amino acids; F or P; M or Nle (Norleucine); N or Q for amidated amino acids; and T or S
  misc_feature (7)..(7): Xaa can be any naturally occurring amino acid
  MISC_FEATURE (8)..(8): X is K, R or H for basic amino acids
  MISC_FEATURE (9)..(9): X is D and E for acidic amino acids
  MISC_FEATURE (10)..(10): X is A and G
  MISC_FEATURE (11)..(11): X is D and E for acidic amino acids
  MISC_FEATURE (12)..(12): X is D and E for acidic amino acids
XXXXXXXXXXXX

SEQ ID NO: 519 - protein, 12 aa, Artificial
  Completely synthesized peptide construct
  MISC_FEATURE (1)..(1): X is 5-aminopentanoic acid for replacement of 3 or 4 amino acids of X2 and X3
  MISC_FEATURE (2)..(2): X is K, R or H for basic amino acids
  MISC_FEATURE (3)..(3): X is F or P
  MISC_FEATURE (4)..(4): X is A and G
  MISC_FEATURE (5)..(5): X is A and G
  MISC_FEATURE (6)..(6): X is A and G
  MISC_FEATURE (7)..(6): X is A and G; D and E for acidic amino acids; I, L or V; K, R or H for basic amino acids; C or S; F, W or Y for aromatic amino acids; F or P; M or Nle (Norleucine); N or Q for amidated amino acids; and T or S
  misc_feature (7)..(7): Xaa can be any naturally occurring amino acid
  MISC_FEATURE (8)..(8): X is K, R or H for basic amino acids
  MISC_FEATURE (9)..(9): X is D and E for acidic amino acids
  MISC_FEATURE (9)..(9): X is D and E for acidic amino acids
  MISC_FEATURE (10)..(10): X is A and G
  MISC_FEATURE (11)..(11): X is D and E for acidic amino acids
  MISC_FEATURE (12)..(12): X is D and E for acidic amino acids
XXXXXXXXXXXX

SEQ ID NO: 520 - protein, 11 aa, Artificial
  Completely synthesized peptide construct
  MISC_FEATURE (1)..(1): X is Gaba2 for X2X3 or X3X2 or X2X3 or X3X2 or X3X3 or X2X2
  MISC_FEATURE (2)..(2): X is K, R or H for basic amino acids
  MISC_FEATURE (3)..(3): X is F or P
  MISC_FEATURE (4)..(4): X is A and G
  MISC_FEATURE (5)..(5): X is A and G
  MISC_FEATURE (6)..(6): X is A and G
  MISC_FEATURE (7)..(7): X is A and G; D and E for acidic amino acids; I, L or V; K, R or H for basic amino acids; C or S; F, W or Y for aromatic amino acids; F or P; M or Nle (Norleucine); N or Q for amidated amino acids; and T or S
  MISC_FEATURE (8)..(8): X is K, R or H for basic amino acids
  MISC_FEATURE (9)..(9): X is D and E for acidic amino acids
  MISC_FEATURE (10)..(10): X is A and G
  MISC_FEATURE (11)..(11): GabaX for X2X3 or X3X2 or X2X3 or X3X2 or X3X3 or X2X2
XXXXXXXXXXX

SEQ ID NO: 521 - protein, 11 aa, Artificial
  Completely synthesized peptide construct
  MISC_FEATURE (1)..(1): X is 5-aminopentanoic acid for replacement fo 3 or 4 amino acids of X2 and X3
  MISC_FEATURE (2)..(2): X is K, R or H for basic amino acids
  MISC_FEATURE (3)..(3): X is F or P
  MISC_FEATURE (4)..(4): X is A and G
  MISC_FEATURE (5)..(5): X is A and G
  MISC_FEATURE (6)..(6): X is A and G
  MISC_FEATURE (7)..(6): X is A and G; D and E for acidic amino acids; I, L or V; K, R or H for basic amino acids; C or S; F, W or Y for aromatic amino acids; F or P; M or Nle (Norleucine); N or Q for amidated amino acids; and T or S
  misc_feature (7)..(7): Xaa can be any naturally occurring amino acid
  MISC_FEATURE (8)..(8): X is K, R or H for basic amino acids
  MISC_FEATURE (9)..(9): X is D and E for acidic amino acids
  MISC_FEATURE (10)..(10): X is A and G
  MISC_FEATURE (11)..(11): X is Gaba2 for X2X3 or X3X2 or X2X3 or X3X2 or X3X3 or X2X2
XXXXXXXXXXX

SEQ ID NO: 522 - protein, 13 aa, Artificial
  Completely synthesized peptide construct
  MISC_FEATURE (1)..(1): X is acetyl or propionyl group, D glycine or D alanine, cyclohexylalanine at amino terminus
  MISC_FEATURE (2)..(2): X is GabaX for X2X3 or X3X2 or X2X3 or X3X2 or X3X3 or X2X2
  MISC_FEATURE (3)..(3): X is K, R or H for basic amino acids
  MISC_FEATURE (4)..(4): X is F or P
  MISC_FEATURE (5)..(5): X is A and G
  MISC_FEATURE (6)..(6): X is A and G
  MISC_FEATURE (7)..(7): X is A and G
  MISC_FEATURE (8)..(8): X is
  MISC_FEATURE (9)..(9): X is K, R or H for basic amino acids
  MISC_FEATURE (10)..(10): X is D and E for acidic amino acids
  MISC_FEATURE (11)..(11): X is A and G
  MISC_FEATURE (12)..(12): X is D and E for acidic amino acids
  MISC_FEATURE (13)..(13): X is D and E for acidic amino acids
XXXXXXXXXXXXX

SEQ ID NO: 523 - protein, 13 aa, Artificial
  Completely synthesized peptide construct
  MISC_FEATURE (1)..(1): X is acetyl or propionyl group, D glycine or D alanine, cyclohexylalanie at amino terminus
  MISC_FEATURE (2)..(2): X is 5-aminipentanoic acid for replacement of 3 or 4 amino acids of X2 and X3
  MISC_FEATURE (3)..(3): X is K, R or H for basic amino acids
  MISC_FEATURE (4)..(4): X is F or P
  MISC_FEATURE (5)..(5): X is A and G
  MISC_FEATURE (6)..(6): X is A and G
  MISC_FEATURE (7)..(7): X is A and G
  MISC_FEATURE (8)..(8): X is
  MISC_FEATURE (9)..(9): X is K, R or H for basic amino acids
  MISC_FEATURE (10)..(10): X is D and E for acidic amino acids
  MISC_FEATURE (11)..(11): X is A and G
  MISC_FEATURE (12)..(12): X is D and E for acidic amino acids
  MISC_FEATURE (13)..(13): X is D and E for acidic amino acids
XXXXXXXXXXXXX

SEQ ID NO: 524 - protein, 12 aa, Artificial
  Completely synthesized peptide construct
  MISC_FEATURE (1)..(1): X is acetyl or propionyl group, D glycine or D alanine, cyclohexylalanine at amino terminus
  MISC_FEATURE (2)..(2): X is GabaX for X2X3 or X3X2 or X2X3 or X3X2 or X3X3 or X2X2
  MISC_FEATURE (3)..(3): X is K, R or H for basic amino acids
  MISC_FEATURE (4)..(4): X is F or P
  MISC_FEATURE (5)..(5): X is A and G
  MISC_FEATURE (6)..(6): X is A and G
  MISC_FEATURE (7)..(7): X is A and G
  MISC_FEATURE (8)..(8): X is
  MISC_FEATURE (9)..(9): X is K, R or H for basic amino acids
  MISC_FEATURE (10)..(10): X is D and E for acidic amino acids
  MISC_FEATURE (11)..(11): X is A and G
  MISC_FEATURE (12)..(12): X is GabaX for X2X3 or X3X2 or X2X3 or X3X2 or X3X3 or X2X2
XXXXXXXXXXXX

SEQ ID NO: 525 - protein, 12 aa, Artificial
  Completely synthesized peptide construct
  MISC_FEATURE (1)..(1): X is acetyl or propionyl group, D glycine or D alanine, cyclohexylalanine at amino terminus
  MISC_FEATURE (2)..(2): X is 5-aminopentanoic acid for replacement of 3 or 4 amino acids of X2 and X3
  MISC_FEATURE (3)..(3): X is K, R or H for basic amino acids
  MISC_FEATURE (4)..(4): X is F or P
  MISC_FEATURE (5)..(5): X is A and G
  MISC_FEATURE (6)..(6): X is A and G
  MISC_FEATURE (7)..(7): X is A and G
  MISC_FEATURE (8)..(8): X is
  MISC_FEATURE (9)..(9): X is K, R or H for basic amino acids
  MISC_FEATURE (10)..(10): X is D and E for acidic amino acids
  MISC_FEATURE (11)..(11): X is A and G
  MISC_FEATURE (12)..(12): X is GabaX for X2X3 or X3X2 or X2X3 or X3X2 or X3X3 or X2X2
XXXXXXXXXXXX

SEQ ID NO: 526 - protein, 13 aa, Artificial
  Completely synthesized peptide construct
PVVHFFKNIVTPR

SEQ ID NO: 527 - protein, 13 aa, Artificial
  Completely synthesized peptide construct
  MISC_FEATURE (1)..(1): X is F or P
  MISC_FEATURE (2)..(2): X is I, L or V
  MISC_FEATURE (3)..(3): X is I, L or V
  MISC_FEATURE (4)..(4): X is K, R or H for basic amino acids
  MISC_FEATURE (5)..(5): X is F or P
  MISC_FEATURE (6)..(6): X is F or P
  MISC_FEATURE (7)..(7): X is K, R or H for basic amino acids
  MISC_FEATURE (8)..(8): X is N or Q for amidated amino acids
  MISC_FEATURE (9)..(9): X is I, L or V
  MISC_FEATURE (10)..(10): X is I, L or V
  MISC_FEATURE (11)..(11): X is T or S
  MISC_FEATURE (12)..(12): X is F or P
  MISC_FEATURE (13)..(13): X is K, R or H for basic amino acids
XXXXXXXXXXXXX

SEQ ID NO: 528 - protein, 14 aa, Artificial
  Completely synthesized peptide construct
  MISC_FEATURE (1)..(1): X is acetyl or propionyl group, D glycine or D alanine, cyclohexylalanine at amino terminus
  MISC_FEATURE (2)..(2): X is F or P
  MISC_FEATURE (3)..(3): X is I, L or V
  MISC_FEATURE (4)..(4): X is I, L or V
  MISC_FEATURE (5)..(5): X is K, R or H for basic amino acids
  MISC_FEATURE (6)..(6): X is F or P
  MISC_FEATURE (7)..(7): X is F or P
  MISC_FEATURE (8)..(8): X is K, R or H for basic amino acids
  MISC_FEATURE (9)..(9): X is N or Q for amidated amino acids
  MISC_FEATURE (10)..(10): X is I, L or V
  MISC_FEATURE (11)..(11): X is I, L or V
  MISC_FEATURE (12)..(12): X is T or S
  MISC_FEATURE (13)..(13): X is F or P
  MISC_FEATURE (14)..(14): X is K, R or H for basic amino acids
XXXXXXXXXXXXXX

SEQ ID NO: 529 - protein, 12 aa, Artificial
  Completely synthesized peptide construct
  MISC_FEATURE (1)..(1): X is F or P
  MISC_FEATURE (2)..(2): X is GabaX for X2X3 or X3X2 or X2X3 or X3X2 or X3X3 or X2X2
  MISC_FEATURE (3)..(3): X is K, R or H for basic amino acids
  MISC_FEATURE (4)..(4): X is F or P
  MISC_FEATURE (5)..(5): X is F or P
  MISC_FEATURE (6)..(6): X is K, R or H for basic amino acids
  MISC_FEATURE (7)..(7): X is N or Q for amidated amino acids
  MISC_FEATURE (8)..(8): X is I, L or V
  MISC_FEATURE (9)..(9): X is I, L or V
  MISC_FEATURE (10)..(10): X is T or S
  MISC_FEATURE (11)..(11): X is F or P
  MISC_FEATURE (12)..(12): X is K, R or H for basic amino acids
XXXXXXXXXXXX

SEQ ID NO: 530 - protein, 13 aa, Artificial
  Completely synthesized peptide construct
  MISC_FEATURE (1)..(1): X is acetyl or propionyl group, D glycine or D alanine, cyclohexylalanine at amino terminus
  MISC_FEATURE (2)..(2): X is F or P
  MISC_FEATURE (3)..(3): X is GabaX for X2X3 or X3X2 or X2X3 or X3X2 or X3X3 or X2X2
  MISC_FEATURE (4)..(4): X is K, R or H for basic amino acids
  MISC_FEATURE (5)..(5): X is F or P
  MISC_FEATURE (6)..(6): X is F or P
  MISC_FEATURE (7)..(7): X is K, R or H for basic amino acids
  MISC_FEATURE (8)..(8): X is N or Q for amidated amino acids
  MISC_FEATURE (9)..(9): X is I, L or V
  MISC_FEATURE (10)..(10): X is I, L or V
  MISC_FEATURE (11)..(11): X is T or S
  MISC_FEATURE (12)..(12): X is F or P
  MISC_FEATURE (13)..(13): X is K, R or H for basic amino acids
XXXXXXXXXXXXX

SEQ ID NO: 531 - protein, 12 aa, Artificial
  Completely synthesized peptide construct
  MISC_FEATURE (1)..(1): X is F or P
  MISC_FEATURE (2)..(2): X is I, L or V
  MISC_FEATURE (3)..(3): X is I, L or V
  MISC_FEATURE (4)..(4): X is K, R or H for basic amino acids
  MISC_FEATURE (5)..(5): X is F or P
  MISC_FEATURE (6)..(6): X is F or P
  MISC_FEATURE (7)..(7): X is K, R or H for basic amino acids
  MISC_FEATURE (8)..(8): X is N or Q for amidated amino acids
  MISC_FEATURE (9)..(9): X is GabaX for X2X3 or X3X2 or X2X3 or X3X2 or X3X3 or X2X2
  MISC_FEATURE (10)..(10): X is T or S
  MISC_FEATURE (11)..(11): X is F or P
  MISC_FEATURE (12)..(12): X is K, R or H for basic amino acids
XXXXXXXXXXXX

SEQ ID NO: 532 - protein, 13 aa, Artificial
  Completely synthesized peptide construct
  MISC_FEATURE (1)..(1): X is acetyl or propionyl group, D glycine or D alanine, cyclohexylalanie at amino terminus
  MISC_FEATURE (2)..(2): X is F or P
  MISC_FEATURE (3)..(3): X is I, L or V
  MISC_FEATURE (4)..(4): X is I, L or V
  MISC_FEATURE (5)..(5): X is K, R or H for basic amino acids
  MISC_FEATURE (6)..(6): X is F or P
  MISC_FEATURE (7)..(7): X is F or P
  MISC_FEATURE (8)..(8): X is K, R or H for basic amino acids
  MISC_FEATURE (9)..(9): X is N or Q for amidated amino acids
  MISC_FEATURE (10)..(10): X is GabaX for X2X3 or X3X2 or X2X3 or X3X2 or X3X3 or X2X2
  MISC_FEATURE (11)..(11): X is T or S
  MISC_FEATURE (12)..(12): X is F or P
  MISC_FEATURE (13)..(13): X is K, R or H for basic amino acids
XXXXXXXXXXXXX

SEQ ID NO: 533 - protein, 13 aa, Artificial
  Completely synthesized peptide construct
  MISC_FEATURE (1)..(1): X is F or P
  MISC_FEATURE (2)..(2): X is I, L or V
  MISC_FEATURE (3)..(3): X is I, L or V
  MISC_FEATURE (4)..(4): X is K, R or H for basic amino acids
  MISC_FEATURE (5)..(5): X is F or P
  MISC_FEATURE (6)..(6): X is F or P
  MISC_FEATURE (7)..(7): X is N or Q for amidated amino acids
  MISC_FEATURE (8)..(8): X is I, L or V
  MISC_FEATURE (9)..(9): X is I, L or V
  MISC_FEATURE (10)..(10): X is T or S
  MISC_FEATURE (11)..(11): X is T or S
  MISC_FEATURE (12)..(12): X is F or P
  MISC_FEATURE (13)..(13): X is K, R or H for basic amino acids
XXXXXXXXXXXXX

SEQ ID NO: 534 - protein, 14 aa, Artificial
  Completely synthesized peptide construct
  MISC_FEATURE (1)..(1): X is acetyl or propionyl group, D glycine or D alanine, cyclodexylalanine at amino terminus
  MISC_FEATURE (2)..(2): X is F or P
  MISC_FEATURE (3)..(3): X is I, L or V
  MISC_FEATURE (4)..(4): X is I, L or V
  MISC_FEATURE (5)..(5): X is K, R or H for basic amino acids
  MISC_FEATURE (6)..(6): X is F or P
  MISC_FEATURE (7)..(7): X is F or P
  MISC_FEATURE (8)..(8): X is K, R or H for basic amino acids
  MISC_FEATURE (9)..(9): X is N or Q for amidated amino acids
  MISC_FEATURE (10)..(10): X is I, L or V
  MISC_FEATURE (11)..(11): X is I, L or V
  MISC_FEATURE (12)..(12): X is T or S
  MISC_FEATURE (13)..(13): X is F or P
  MISC_FEATURE (14)..(14): X is K, R or H for basic amino acids
XXXXXXXXXXXXXX

SEQ ID NO: 535 - protein, 11 aa, Artificial
  Completely synthesized peptide construct
  MISC_FEATURE (1)..(1): X is F or P
  MISC_FEATURE (2)..(2): X is GabaX for X2X3 or X3X2 or X2X3 or X3X2 or X3X3 or X2X2
  MISC_FEATURE (3)..(3): X is K, R or H for basic amino acids
  MISC_FEATURE (4)..(4): X is F or P
  MISC_FEATURE (5)..(5): X is F or P
  MISC_FEATURE (6)..(6): X is K, R or H for basic amino acids
  MISC_FEATURE (7)..(7): X is N or Q for amidated amino acids
  MISC_FEATURE (8)..(8): X is GabaX for X2X3 or X3X2 or X2X3 or X3X2 or X3X3 or X2X2
  MISC_FEATURE (9)..(9): X is T or S
  MISC_FEATURE (10)..(10): X is F or P
  MISC_FEATURE (11)..(11): X is K, R or H for basic amino acids
XXXXXXXXXXX

SEQ ID NO: 536 - protein, 12 aa, Artificial
  Completely synthesized peptide construct
  MISC_FEATURE (1)..(1): X is acetyl or propionyl group, D glycine or D alanine, cyclohexylalanine at amino terminus
  MISC_FEATURE (2)..(2): X is F or P
  MISC_FEATURE (3)..(3): X is GabaX for X2X3 or X3X2 or X2X3 or X3X2 or X3X3 or X2X2
  MISC_FEATURE (4)..(4): X is K, R or H for basic amino acids
  MISC_FEATURE (5)..(5): X is F or P
  MISC_FEATURE (6)..(6): X is F or P
  MISC_FEATURE (7)..(7): X is K, R or H for basic amino acids
  MISC_FEATURE (8)..(8): X is N or Q for amidated amino acids
  MISC_FEATURE (9)..(9): X is GabaX for X2X3 or X3X2 or X2X3 or X3X2 or X3X3 or X2X2
  MISC_FEATURE (10)..(10): X is T or S
  MISC_FEATURE (11)..(11): X is F or P
  MISC_FEATURE (12)..(12): X is K, R or H for basic amino acids
XXXXXXXXXXXX

SEQ ID NO: 537 - protein, 13 aa, Artificial
  Completely synthesized peptide construct
HSLGKWLGHPDKF

SEQ ID NO: 538 - protein, 13 aa, Artificial
  Completely synthesized peptide construct
  MISC_FEATURE (1)..(1): X is K, R or H for basic amino acids
  MISC_FEATURE (2)..(2): X is T or S
  MISC_FEATURE (3)..(3): X is I, L or V
  MISC_FEATURE (4)..(4): X is A and G
  MISC_FEATURE (5)..(5): X is K, R or H for basic amino acids
  MISC_FEATURE (6)..(6): X is F, W or Y for aromatic amino acids
  MISC_FEATURE (7)..(7): X is I, L or V
  MISC_FEATURE (8)..(8): X is A and G
  MISC_FEATURE (9)..(9): X is K, R or H for basic amino acids
  MISC_FEATURE (10)..(10): X is F or P
  MISC_FEATURE (11)..(11): X is D and E for acidic amino acids
  MISC_FEATURE (12)..(12): X is K, R or H for basic amino acids
  MISC_FEATURE (13)..(13): X is F or P
XXXXXXXXXXXXX

SEQ ID NO: 539 - protein, 14 aa, Artificial
  Completely synthesized peptide construct
  MISC_FEATURE (1)..(1): X is acetyl or propionyl group, D glycine or D alanine, cyclohexylalanine at amino terminus
  MISC_FEATURE (2)..(2): X is K, R or H for basic amino acids
  MISC_FEATURE (3)..(3): X is T or S
  MISC_FEATURE (4)..(4): X is I, L or V
  MISC_FEATURE (5)..(5): X is A and G
  MISC_FEATURE (6)..(6): X is K, R or H for basic amino acids
  MISC_FEATURE (7)..(7): X is F, W or Y for aromatic amino acids
  MISC_FEATURE (8)..(8): X is I, L or V
  MISC_FEATURE (9)..(9): X is A and G
  MISC_FEATURE (10)..(10): X is K, R or H for basic amino acids
  MISC_FEATURE (11)..(11): X is F or P
  MISC_FEATURE (12)..(12): X is D and E for acidic amino acids
  MISC_FEATURE (13)..(13): X is K, R or H for basic amino acids
  MISC_FEATURE (14)..(14): X is F or P
XXXXXXXXXXXXXX

SEQ ID NO: 540 - protein, 11 aa, Artificial
  Completely synthesized peptide construct
TEISFKLGQEF

SEQ ID NO: 541 - protein, 11 aa, Artificial
  Completely synthesized peptide construct
  MISC_FEATURE (1)..(1): X is T or S
  MISC_FEATURE (2)..(2): X is D and E for acidic amino acids
  MISC_FEATURE (3)..(3): X is I, L or V
  MISC_FEATURE (4)..(4): X is T or S
  MISC_FEATURE (5)..(5): X is F or P
  MISC_FEATURE (6)..(6): X is K, R or H for basic amino acids
  MISC_FEATURE (7)..(7): X is K, R or H for basic amino acids
  MISC_FEATURE (8)..(8): X is A and G
  MISC_FEATURE (9)..(9): X is N or Q for amidated amino acids
  MISC_FEATURE (10)..(10): X is D and E for acidic amino acids
  MISC_FEATURE (11)..(11): X is F or P
XXXXXXXXXXX

SEQ ID NO: 542 - protein, 10 aa, Artificial
  Completely synthesized peptide construct
  MISC_FEATURE (1)..(1): X is T or S
  MISC_FEATURE (2)..(2): X is GabaX for X2X3 or X3X2 or X2X3 or X3X2 or X3X3 or X2X2
  MISC_FEATURE (3)..(3): X is T or S
  MISC_FEATURE (4)..(4): X is F or P
  MISC_FEATURE (5)..(5): X is K, R or H for basic amino acids
  MISC_FEATURE (6)..(6): X is K, R or H for basic amino acids
  MISC_FEATURE (7)..(7): X is A and G
  MISC_FEATURE (8)..(8): X is N or Q for amidated amino acids
  MISC_FEATURE (9)..(9): X is D and E for acidic amino acids
  MISC_FEATURE (10)..(10): X is F or P
XXXXXXXXXX

SEQ ID NO: 543 - protein, 12 aa, Artificial
  Completely synthesized peptide construct
  MISC_FEATURE (1)..(1): X is acetyl or propionyl group, D glycine or D alanine, cyclohexylalanine at amino terminus
  MISC_FEATURE (2)..(2): X is T or S
  MISC_FEATURE (3)..(3): X is D and E for acidic amino acids
  MISC_FEATURE (4)..(4): X is I, L or V
  MISC_FEATURE (5)..(5): X is T or S
  MISC_FEATURE (6)..(6): X is F or P
  MISC_FEATURE (7)..(7): X is K, R or H for basic amino acids
  MISC_FEATURE (8)..(8): X is K, R or H for basic amino acids
  MISC_FEATURE (9)..(9): X is A and G
  MISC_FEATURE (10)..(10): X is N or Q for amidated amino acids
  MISC_FEATURE (11)..(11): X is D and E for acidic amino acids
  MISC_FEATURE (12)..(12): X is F or P
XXXXXXXXXXXX

SEQ ID NO: 544 - protein, 11 aa, Artificial
  Completely synthesized peptide construct
  MISC_FEATURE (1)..(1): X is acetyl or propionyl group, D glycine or D alanine, cyclohexylalanine at amino terminus
  MISC_FEATURE (2)..(2): X is T or S
  MISC_FEATURE (3)..(3): X is GabaX for X2X3 or X3X2 or X2X3 or X3X2 or X3X3 or X2X2
  MISC_FEATURE (4)..(4): X is T or S
  MISC_FEATURE (5)..(5): X is F or P
  MISC_FEATURE (6)..(6): X is K, R or H for basic amino acids
  MISC_FEATURE (7)..(7): X is K, R or H for basic amino acids
  MISC_FEATURE (8)..(8): X is A and G
  MISC_FEATURE (9)..(9): X is N or Q for amidated amino acids
  MISC_FEATURE (10)..(10): X is D and E for acidic amino acids
  MISC_FEATURE (11)..(11): X is F or P
XXXXXXXXXXX

SEQ ID NO: 545 - protein, 11 aa, Artificial
  Completely synthesized peptide construct
SLDGELKALFK

SEQ ID NO: 546 - protein, 11 aa, Artificial
  Completely synthesized peptide construct
  MISC_FEATURE (1)..(1): X is T or S
  MISC_FEATURE (2)..(2): X is I, L or V
  MISC_FEATURE (3)..(3): X is D and E for acidic amino acids
  MISC_FEATURE (4)..(4): X is A and G
  MISC_FEATURE (5)..(5): X is D and E for acidic amino acids
  MISC_FEATURE (6)..(6): X is I, L or V
  MISC_FEATURE (7)..(7): X is K, R or H for basic amino acids
  MISC_FEATURE (8)..(8): X is A and G
  MISC_FEATURE (9)..(9): X is I, L or V
  MISC_FEATURE (10)..(10): X is F or P
  MISC_FEATURE (11)..(11): X is K, R or H for basic amino acids
XXXXXXXXXXX

SEQ ID NO: 547 - protein, 10 aa, Artificial
  Completely synthesized peptide construct
  MISC_FEATURE (1)..(1): X is T or S
  MISC_FEATURE (2)..(2): X  is  GabaX for X2X3 or X3X2 or X2X3 or X3X2 or X3X3 or X2X2
  MISC_FEATURE (3)..(3): X is A and G
  MISC_FEATURE (4)..(4): X is D and E for acidic amino acids
  MISC_FEATURE (5)..(5): X is I, L or V
  MISC_FEATURE (6)..(6): X is K, R or H for basic amino acids
  MISC_FEATURE (7)..(7): X is A and G
  MISC_FEATURE (8)..(8): X is I, L or V
  MISC_FEATURE (9)..(9): X is F or P
  MISC_FEATURE (10)..(10): X is K, R or H for basic amino acids
XXXXXXXXXX

SEQ ID NO: 548 - protein, 10 aa, Artificial
  Completely synthesized peptide construct
  MISC_FEATURE (1)..(1): X is T or S
  MISC_FEATURE (2)..(2): X is I, L or V
  MISC_FEATURE (3)..(3): X is D and E for acidic amino acids
  MISC_FEATURE (4)..(4): X is A and G
  MISC_FEATURE (5)..(5): X is GabaX for X2X3 or X3X2 or X2X3 or X3X2 or X3X3 or X2X2
  MISC_FEATURE (6)..(6): X is K, R or H for basic amino acids
  MISC_FEATURE (7)..(7): X is A and G
  MISC_FEATURE (8)..(8): X is I, L or V
  MISC_FEATURE (9)..(9): X is F or P
  MISC_FEATURE (10)..(10): X is K, R or H for basic amino acids
XXXXXXXXXX

SEQ ID NO: 549 - protein, 9 aa, Artificial
  Completely synthesized peptide construct
  MISC_FEATURE (1)..(1): X is T or S
  MISC_FEATURE (2)..(2): X is GabaX for X2X3 or X3X2 or X2X3 or X3X2 or X3X3 or X2X2
  MISC_FEATURE (3)..(3): X is A and G
  MISC_FEATURE (4)..(4): X is GabaX for X2X3 or X3X2 or X2X3 or X3X2 or X3X3 or X2X2
  MISC_FEATURE (5)..(5): X is K, R or H for basic amino acids
  MISC_FEATURE (6)..(6): X is A and G
  MISC_FEATURE (7)..(7): X is I, L or V
  MISC_FEATURE (8)..(8): X is F or P
  MISC_FEATURE (9)..(9): X is K, R or H for basic amino acids
XXXXXXXXX

SEQ ID NO: 550 - protein, 12 aa, Artificial
  Completely synthesized peptide construct
  MISC_FEATURE (1)..(1): X is acetyl or proionyl group, D glycine or D alanine, cyclohexylalanine at amino terminus
  MISC_FEATURE (2)..(2): X is T or S
  MISC_FEATURE (3)..(3): X is I, L or V
  MISC_FEATURE (4)..(4): X is D and E for acidic amino acids
  MISC_FEATURE (5)..(5): X is A and G
  MISC_FEATURE (6)..(6): X is D and E for acidic amino acids
  MISC_FEATURE (7)..(7): X is I, L or V
  MISC_FEATURE (8)..(8): X is K, R or H for basic amino acids
  MISC_FEATURE (9)..(9): X is A and G
  MISC_FEATURE (10)..(10): X is I, L or V
  MISC_FEATURE (11)..(11): X is F or P
  MISC_FEATURE (12)..(12): X is K, R or H for basic amino acids
XXXXXXXXXXXX

SEQ ID NO: 551 - protein, 11 aa, Artificial
  Completely synthesized peptide construct
  MISC_FEATURE (1)..(1): X is aceytl or propionyl group, D glycine or D alanine, cyclohexylalanine at amino terminus
  MISC_FEATURE (2)..(2): X is T or S
  MISC_FEATURE (3)..(3): X is GabaX for X2X3 or X3X2 or X2X3 or X3X2 or X3X3 or X2X2
  MISC_FEATURE (4)..(4): X is A and G
  MISC_FEATURE (5)..(5): X is D and E for acidic amino acids
  MISC_FEATURE (6)..(6): X is I, L or V
  MISC_FEATURE (7)..(7): X is K, R or H for basic amino acids
  MISC_FEATURE (8)..(8): X is A and G
  MISC_FEATURE (9)..(9): X is I, L or V
  MISC_FEATURE (10)..(10): X is F or P
  MISC_FEATURE (11)..(11): X is K, R or H for basic amino acids
XXXXXXXXXXX

SEQ ID NO: 552 - protein, 11 aa, Artificial
  Completely synthesized peptide construct
  MISC_FEATURE (1)..(1): X is acetyl or propionyl group, D glycine or D alanine, cyclohexylalanine at amino terminus
  MISC_FEATURE (2)..(2): X is T or S
  MISC_FEATURE (3)..(3): X is I, L or V
  MISC_FEATURE (4)..(4): X is D and E for acidic amino acids
  MISC_FEATURE (5)..(5): X is A and G
  MISC_FEATURE (6)..(6): X is GabaX for X2X3 or X3X2 or X2X3 or X3X2 or X3X3 or X2X2
  MISC_FEATURE (7)..(7): X is K, R or H for basic amino acids
  MISC_FEATURE (8)..(8): X is A and G
  MISC_FEATURE (9)..(9): X is I, L or V
  MISC_FEATURE (10)..(10): X is F or P
  MISC_FEATURE (11)..(11): X is K, R or H for basic amino acids
XXXXXXXXXXX

SEQ ID NO: 553 - protein, 10 aa, Artificial
  Completely synthesized peptide construct
  MISC_FEATURE (1)..(1): X is aceytl or propionyl group, D glycine or D alanine, cyclohexylalanine at amino terminus
  MISC_FEATURE (2)..(2): X is T or S
  MISC_FEATURE (3)..(3): X is GabaX for X2X3 or X3X2 or X2X3 or X3X2 or X3X3 or X2X2
  MISC_FEATURE (4)..(4): X is A and G
  MISC_FEATURE (5)..(5): X is GabaX for X2X3 or X3X2 or X2X3 or X3X2 or X3X3 or X2X2
  MISC_FEATURE (6)..(6): X is K, R or H for basic amino acids
  MISC_FEATURE (7)..(7): X is A and G
  MISC_FEATURE (8)..(8): X is I, L or V
  MISC_FEATURE (9)..(9): X is F or P
  MISC_FEATURE (10)..(10): X is K, R or H for basic amino acids
XXXXXXXXXX

SEQ ID NO: 554 - protein, 7 aa, Artificial
  Completely synthesized peptide construct
FKNIVTP

SEQ ID NO: 555 - protein, 7 aa, Artificial
  Completely synthesized peptide construct
  MISC_FEATURE (1)..(1): X is F or P
  MISC_FEATURE (2)..(2): X is K, R or H for basic amino acids
  MISC_FEATURE (3)..(3): X is N or Q for amidated amino acids
  MISC_FEATURE (4)..(4): X is I, L or V
  MISC_FEATURE (5)..(5): X is I, L or V
  MISC_FEATURE (6)..(6): X is T or S
  MISC_FEATURE (7)..(7): X is F or P
XXXXXXX

SEQ ID NO: 556 - protein, 6 aa, Artificial
  Completely synthesized peptide construct
  MISC_FEATURE (1)..(1): X is F or P
  MISC_FEATURE (2)..(2): X is K, R or H for basic amino acids
  MISC_FEATURE (3)..(3): X is N or Q for amidated amino acids
  MISC_FEATURE (4)..(4): X is GabaX for X2X3 or X3X2 or X2X3 or X3X2 or X3X3 or X2X2
  MISC_FEATURE (5)..(5): X is T or S
  MISC_FEATURE (6)..(6): X is F or P
XXXXXX

SEQ ID NO: 557 - protein, 8 aa, Artificial
  Completely synthesized peptide construct
  MISC_FEATURE (1)..(1): X is acetyl or propionyl group, D glycine or D alanine, cyclohexylalanine at amino terminus
  MISC_FEATURE (2)..(2): X is F or P
  MISC_FEATURE (3)..(3): X is K, R or H for basic amino acids
  MISC_FEATURE (4)..(4): X is N or Q for amidated amino acids
  MISC_FEATURE (5)..(5): X is I, L or V
  MISC_FEATURE (6)..(6): X is I, L or V
  MISC_FEATURE (7)..(7): X is T or S
  MISC_FEATURE (8)..(8): X is F or P
XXXXXXXX

SEQ ID NO: 558 - protein, 7 aa, Artificial
  Completely synthesized peptide construct
  MISC_FEATURE (1)..(1): X is acetyl or propionyl group, D glycine or D alanine, cyclohexylalanine at amino terminus
  MISC_FEATURE (2)..(2): X is F or P
  MISC_FEATURE (3)..(3): X is K, R or H for basic amino acids
  MISC_FEATURE (4)..(4): X is N or Q for amidated amino acids
  MISC_FEATURE (5)..(5): X is GabaX for X2X3 or X3X2 or X2X3 or X3X2 or X3X3 or X2X2
  MISC_FEATURE (6)..(6): X is T or S
  MISC_FEATURE (7)..(7): X is F or P
XXXXXXX

SEQ ID NO: 559 - protein, 13 aa, Artificial
  Completely synthesized peptide construct
HSLGKWLGHPDKF

SEQ ID NO: 560 - protein, 14 aa, Artificial
  Completely synthesized peptide construct
NTWTTCQSIAFPSK

SEQ ID NO: 561 - protein, 14 aa, Artificial
  Completely synthesized peptide construct
  MISC_FEATURE (1)..(1): X is N or Q for amidated amino acids
  MISC_FEATURE (2)..(2): X is T or S
  MISC_FEATURE (3)..(3): X is F, W or Y for aromatic amino acids
  MISC_FEATURE (4)..(4): X is T or S
  MISC_FEATURE (5)..(5): X is T or S
  MISC_FEATURE (6)..(6): X is C or S
  MISC_FEATURE (7)..(7): X is N or Q for amidated amino acids
  MISC_FEATURE (8)..(8): X is M or Nle (Norleucine)
  MISC_FEATURE (9)..(9): X is I, L or V
  MISC_FEATURE (10)..(10): X is A and G
  MISC_FEATURE (11)..(11): X is F or P
  MISC_FEATURE (12)..(12): X is F or P
  MISC_FEATURE (13)..(13): X is T or S
  MISC_FEATURE (14)..(14): X is K, R or H for basic amino acids
XXXXXXXXXXXXXX

SEQ ID NO: 562 - protein, 15 aa, Artificial
  Completely synthesized peptide construct
  MISC_FEATURE (1)..(1): X is acetyl or propionyl group, D glycine or D alanine, cyclohexylalanine at amino terminus
  MISC_FEATURE (2)..(2): X is N or Q for amidated amino acids
  MISC_FEATURE (3)..(3): X is T or S
  MISC_FEATURE (4)..(4): X is F, W or Y for aromatic amino acids
  MISC_FEATURE (5)..(5): X is T or S
  MISC_FEATURE (6)..(6): X is T or S
  MISC_FEATURE (7)..(7): X is C or S
  MISC_FEATURE (8)..(8): X is N or Q for amidated amino acids
  MISC_FEATURE (9)..(9): X is T or S
  MISC_FEATURE (10)..(10): X is I, L or V
  MISC_FEATURE (11)..(11): X is A and G
  MISC_FEATURE (12)..(12): X is F or P
  MISC_FEATURE (13)..(13): X is F or P
  MISC_FEATURE (14)..(14): X is T or S
  MISC_FEATURE (15)..(15): X is K, R or H for basic amino acids
XXXXXXXXXXXXXXX

SEQ ID NO: 563 - protein, 18 aa, Artificial
  Completely synthesized peptide construct
IYFNTWTTCQSIAFPSKT

SEQ ID NO: 564 - protein, 18 aa, Artificial
  Completely synthesized peptide construct
  MISC_FEATURE (1)..(1): X is I, L or V
  MISC_FEATURE (2)..(2): X is F, W or Y for aromatic amino acids
  MISC_FEATURE (3)..(3): X is F, W or Y for aromatic amino acids
  MISC_FEATURE (4)..(4): X is N or Q for amidated amino acids
  MISC_FEATURE (5)..(5): X is T or S
  MISC_FEATURE (6)..(6): X is F, W or Y for aromatic amino acids
  MISC_FEATURE (7)..(7): X is T or S
  MISC_FEATURE (8)..(8): X is T or S
  MISC_FEATURE (9)..(9): X is C or S
  MISC_FEATURE (10)..(10): X is N or Q for amidated amino acids
  MISC_FEATURE (11)..(11): X is T or s
  MISC_FEATURE (12)..(12): X is I, L or V
  MISC_FEATURE (13)..(13): X is A and G
  MISC_FEATURE (14)..(14): X is F or P
  MISC_FEATURE (15)..(15): X is F or P
  MISC_FEATURE (16)..(16): X is T or S
  MISC_FEATURE (17)..(17): X is K, R or H for basic amino acids
  MISC_FEATURE (18)..(18): X is T or S
XXXXXXXXXXXXXXXXXX

SEQ ID NO: 565 - protein, 19 aa, Artificial
  Completely synthesized peptide construct
  MISC_FEATURE (1)..(1): X is acetyl or propionyl group, D glycine or D alanine, cyclohexylalanine at amino terminus
  MISC_FEATURE (2)..(2): X is I, L or V
  MISC_FEATURE (3)..(3): X is F, W or Y for aromatic amino acids
  MISC_FEATURE (4)..(4): X is F, W or Y or aromatic amino acids
  MISC_FEATURE (5)..(5): X is N or Q for amidated amino acids
  MISC_FEATURE (6)..(6): X is T or S
  MISC_FEATURE (7)..(7): X is F, W or Y for aromatic amino acids
  MISC_FEATURE (8)..(8): X is T or S
  MISC_FEATURE (9)..(9): X is T or S
  MISC_FEATURE (10)..(10): X is C or S
  MISC_FEATURE (11)..(11): X is N or Q for amidated amino acids
  MISC_FEATURE (12)..(12): X is T or S
  MISC_FEATURE (13)..(13): X is I, L or V
  MISC_FEATURE (14)..(14): X is A and G
  MISC_FEATURE (15)..(15): X is F or P
  MISC_FEATURE (16)..(16): X is F or P
  MISC_FEATURE (17)..(17): X is T or S
  MISC_FEATURE (18)..(18): X is K, R or H for basic amino acids
  MISC_FEATURE (19)..(19): X is T or S
XXXXXXXXXXXXXXXXXXX

SEQ ID NO: 566 - protein, 23 aa, Artificial
  Completely synthesized peptide construct
QKFSEHFSIHCCPPFTFLNSSKR

SEQ ID NO: 567 - protein, 23 aa, Artificial
  Completely synthesized peptide construct
  MISC_FEATURE (1)..(1): X is N or Q for amidated amino acids
  MISC_FEATURE (2)..(2): X is K, R or H for basic amino acids
  MISC_FEATURE (3)..(3): X is F, W or Y for aromatic amino acids
  MISC_FEATURE (4)..(4): X is T or S
  MISC_FEATURE (5)..(5): X is D and E for acidic amino acids
  MISC_FEATURE (6)..(6): X is K, R or H for basic amino acids
  MISC_FEATURE (7)..(7): X is F or P
  MISC_FEATURE (8)..(8): X is T or S
  MISC_FEATURE (9)..(9): X is I, L or V
  MISC_FEATURE (10)..(10): X is K, R or H for basic amino acids
  MISC_FEATURE (11)..(11): X is C or S
  MISC_FEATURE (12)..(12): X is C or S
  MISC_FEATURE (13)..(13): X is F or P
  MISC_FEATURE (14)..(14): X is F or P
  MISC_FEATURE (15)..(15): X is F, W or Y for aromatic amino acids
  MISC_FEATURE (16)..(16): X is T or S
  MISC_FEATURE (17)..(17): X is F, W or Y for aromatic amino acids
  MISC_FEATURE (18)..(18): X is I, L or V
  MISC_FEATURE (19)..(19): X is N or Q for amidated amino acids
  MISC_FEATURE (20)..(20): X is T or S
  MISC_FEATURE (21)..(21): X is T or S
  MISC_FEATURE (22)..(22): X is K, R or H for basic amino acids
  MISC_FEATURE (23)..(23): X is K, R or H for basic amino acids
XXXXXXXXXXXXXXXXXXXXXXX

SEQ ID NO: 568 - protein, 24 aa, Artificial
  Completely synthesized peptide construct
  MISC_FEATURE (1)..(1): X is acetyl or propionyl group, D glycine or D alanine, cyclohexylalanine at amino terminus
  MISC_FEATURE (2)..(2): X is N or Q for amidated amino acids
  MISC_FEATURE (3)..(3): X is K, R or H for basic amino acids
  MISC_FEATURE (4)..(4): X is F, W or Y for aromatic amino acids
  MISC_FEATURE (5)..(5): X is T or S
  MISC_FEATURE (6)..(6): X is D and E for acidic amino acids
  MISC_FEATURE (7)..(7): X is K, R or H for basic amino acids
  MISC_FEATURE (8)..(8): X is F or P
  MISC_FEATURE (9)..(9): X is T or S
  MISC_FEATURE (10)..(10): X is K, R or H for basic amino acids
  MISC_FEATURE (11)..(11): X is K, R or H for basic amino acids
  MISC_FEATURE (12)..(12): X is C or S
  MISC_FEATURE (13)..(13): X is C or S
  MISC_FEATURE (14)..(14): X is F or P
  MISC_FEATURE (15)..(15): X is F or P
  MISC_FEATURE (16)..(16): X is F, W or Y for aromatic amino acids
  MISC_FEATURE (17)..(17): X is T or S
  MISC_FEATURE (18)..(18): X is F, W or Y for aromatic amino acids
  MISC_FEATURE (19)..(19): X is I, L or V
  MISC_FEATURE (20)..(20): X is N or Q for amidated amino acids
  MISC_FEATURE (21)..(21): X is T or S
  MISC_FEATURE (22)..(22): X is T or S
  MISC_FEATURE (23)..(23): X is K, R or H for basic amino acids
  MISC_FEATURE (24)..(24): X is K, R or H for basic amino acids
XXXXXXXXXXXXXXXXXXXXXXXX

SEQ ID NO: 569 - protein, 20 aa, Artificial
  Completely synthesized peptide construct
GQFRVIGPRHPIRALVGDEV

SEQ ID NO: 570 - protein, 20 aa, Artificial
  Completely synthesized peptide construct
  MISC_FEATURE (1)..(1): X is A and G
  MISC_FEATURE (2)..(2): X is N or Q for amidated amino acids
  MISC_FEATURE (3)..(3): X is F, W or Y for aromatic amino acids
  MISC_FEATURE (4)..(4): X is K, R or H for basic amino acids
  MISC_FEATURE (5)..(5): X is I, L or V
  MISC_FEATURE (6)..(6): X is I, L or V
  MISC_FEATURE (7)..(7): X is A and G
  MISC_FEATURE (8)..(8): X is F or P
  MISC_FEATURE (9)..(9): X is K, R or H for basic amino acids
  MISC_FEATURE (10)..(10): X is K, R or H for basic amino acids
  MISC_FEATURE (11)..(11): X is F or P
  MISC_FEATURE (12)..(12): X is I, L or V
  MISC_FEATURE (13)..(13): X is K, R or H for basic amino acids
  MISC_FEATURE (14)..(14): X is A and G
  MISC_FEATURE (15)..(15): X is I, L or V
  MISC_FEATURE (16)..(16): X is I, L or V
  MISC_FEATURE (17)..(17): X is A and G
  MISC_FEATURE (18)..(18): X is D and E for acidic amino acids
  MISC_FEATURE (19)..(19): X is D and E for acidic amino acids
  MISC_FEATURE (20)..(20): X is I, L or V
XXXXXXXXXXXXXXXXXXXX

SEQ ID NO: 571 - protein, 20 aa, Artificial
  Completely synthesized peptide construct
  MISC_FEATURE (1)..(1): X is A and G
  MISC_FEATURE (2)..(2): X is N or Q for amidated amino acids
  MISC_FEATURE (3)..(3): X is F, W or Y for aromatic amino acids
  MISC_FEATURE (4)..(4): X is K, R or H for basic amino acids
  MISC_FEATURE (5)..(5): X is I, L or V
  MISC_FEATURE (6)..(6): X is I, L or V
  MISC_FEATURE (7)..(7): X is A and G
  MISC_FEATURE (8)..(8): X is F or P
  MISC_FEATURE (9)..(9): X is K, R or H for basic amino acids
  MISC_FEATURE (10)..(10): X is K, R or H for basic amino acids
  MISC_FEATURE (11)..(11): X is F or P
  MISC_FEATURE (12)..(12): X is I, L or V
  MISC_FEATURE (13)..(13): X is K, R or H for basic amino acids
  MISC_FEATURE (14)..(14): X is A and G
  MISC_FEATURE (15)..(15): X is I, L or V
  MISC_FEATURE (16)..(16): X is I, L or V
  MISC_FEATURE (17)..(17): X is A and G
  MISC_FEATURE (18)..(18): X is D and E for acidic amino acids
  MISC_FEATURE (19)..(19): X is D and E for acidic amino acids
  MISC_FEATURE (20)..(20): X is I, L or V
XXXXXXXXXXXXXXXXXXXX

SEQ ID NO: 572 - protein, 19 aa, Artificial
  Completely synthesized peptide construct
  MISC_FEATURE (1)..(1): X is A and G
  MISC_FEATURE (2)..(2): X is N or Q for amidated amino acids
  MISC_FEATURE (3)..(3): X is F, W or Y for aromatic amino acids
  MISC_FEATURE (4)..(4): X is K, R or H for basic amino acids
  MISC_FEATURE (5)..(5): X is GabaX for X2X3 or X3X2 or X2X3 or X3X2 or X3X3 or X2X2
  MISC_FEATURE (6)..(6): X is A and G
  MISC_FEATURE (7)..(7): X is F or P
  MISC_FEATURE (8)..(8): X is K, R or H for basic amino acids
  MISC_FEATURE (9)..(9): X is K, R or H for basic amino acids
  MISC_FEATURE (10)..(10): X is F or P
  MISC_FEATURE (11)..(11): X is I, L or V
  MISC_FEATURE (12)..(12): X is K, R or H for basic amino acids
  MISC_FEATURE (13)..(13): X is A and G
  MISC_FEATURE (14)..(14): X is I, L or V
  MISC_FEATURE (15)..(15): X is I, L or V
  MISC_FEATURE (16)..(16): X is A and G
  MISC_FEATURE (17)..(17): X is D and E for acidic amino acids
  MISC_FEATURE (18)..(18): X is D and E for acidic amino acids
  MISC_FEATURE (19)..(19): X is I, L or V
XXXXXXXXXXXXXXXXXXX

SEQ ID NO: 573 - protein, 19 aa, Artificial
  Completely synthesized peptide construct
  MISC_FEATURE (1)..(1): X is A and G
  MISC_FEATURE (2)..(2): X is N or Q for amidated amino acids
  MISC_FEATURE (3)..(3): X is F, W or Y for aromatic amino acids
  MISC_FEATURE (4)..(4): X is K, R or H for basic amino acids
  MISC_FEATURE (5)..(5): X is I, L or V
  MISC_FEATURE (6)..(6): X is I, L or V
  MISC_FEATURE (7)..(7): X is A and G
  MISC_FEATURE (8)..(8): X is F or P
  MISC_FEATURE (9)..(9): X is K, R or H for basic amino acids
  MISC_FEATURE (10)..(10): X is K, R or H for basic amino acids
  MISC_FEATURE (11)..(11): X is F or P
  MISC_FEATURE (12)..(12): X is I, L or V
  MISC_FEATURE (13)..(13): X is K, R or H for basic amino acids
  MISC_FEATURE (14)..(14): X is A and G
  MISC_FEATURE (15)..(15): X is GabaX for X2X3 or X3X2 or X2X3 or X3X2 or X3X3 or X2X2
  MISC_FEATURE (16)..(16): X is A and G
  MISC_FEATURE (17)..(17): X is D and E for acidic amino acids
  MISC_FEATURE (18)..(18): X is D and E for acidic amino acids
  MISC_FEATURE (19)..(19): X is I, L or V
XXXXXXXXXXXXXXXXXXX

SEQ ID NO: 574 - protein, 18 aa, Artificial
  Completely synthesized peptide construct
  MISC_FEATURE (1)..(1): X is A and G
  MISC_FEATURE (2)..(2): X is N or Q for amidated amino acids
  MISC_FEATURE (3)..(3): X is F, W or Y for aromatic amino acids
  MISC_FEATURE (4)..(4): X is K, R or H for basic amino acids
  MISC_FEATURE (5)..(5): X is I, L or V
  MISC_FEATURE (6)..(6): X is I, L or V
  MISC_FEATURE (7)..(7): X is A and G
  MISC_FEATURE (8)..(8): X is F or P
  MISC_FEATURE (9)..(9): X is K, R or H for basic amino acids
  MISC_FEATURE (10)..(10): X is K, R or H for basic amino acids
  MISC_FEATURE (11)..(11): X is F or P
  MISC_FEATURE (12)..(12): X is I, L or V
  MISC_FEATURE (13)..(13): X is K, R or H for basic amino acids
  MISC_FEATURE (14)..(14): X is A and G
  MISC_FEATURE (15)..(15): X is I, L or V
  MISC_FEATURE (16)..(16): X is I, L or V
  MISC_FEATURE (17)..(17): X is A and G
  MISC_FEATURE (18)..(18): X is GabaX for X2X3 or X3X2 or X2X3 or X3X2 or X3X3 or X2X2
XXXXXXXXXXXXXXXXXX

SEQ ID NO: 575 - protein, 18 aa, Artificial
  Completely synthesized peptide construct
  MISC_FEATURE (1)..(1): X is A and G
  MISC_FEATURE (2)..(2): X is N or Q for amidated amino acids
  MISC_FEATURE (3)..(3): X is F, W or Y for aromatic amino acids
  MISC_FEATURE (4)..(4): X is K, R or H for basic amino acids
  MISC_FEATURE (5)..(5): X is GabaX for X2X3 or X3X2 or X2X3 or X3X2 or X3X3 or X2X2
  MISC_FEATURE (6)..(6): X is A and G
  MISC_FEATURE (7)..(7): X is F or P
  MISC_FEATURE (8)..(8): X is K, R or H for basic amino acids
  MISC_FEATURE (9)..(9): X is K, R or H for basic amino acids
  MISC_FEATURE (10)..(10): X is F or P
  MISC_FEATURE (11)..(11): X is I, L or V
  MISC_FEATURE (12)..(12): X is K, R or H for basic amino acids
  MISC_FEATURE (13)..(13): X is A and G
  MISC_FEATURE (14)..(14): X is GabaX for X2X3 or X3X2 or X2X3 or X3X2 or X3X3 or X2X2
  MISC_FEATURE (15)..(15): X is A and G
  MISC_FEATURE (16)..(16): X is D and E for acidic amino acids
  MISC_FEATURE (17)..(17): X is D and E for acidic amino acids
  MISC_FEATURE (18)..(18): X is I, L or V
XXXXXXXXXXXXXXXXXX

SEQ ID NO: 576 - protein, 16 aa, Artificial
  Completely synthesized peptide construct
  MISC_FEATURE (1)..(1): X is A and G
  MISC_FEATURE (2)..(2): X is N or Q for amidated amino acids
  MISC_FEATURE (3)..(3): X is F, W or Y for aromatic amino acids
  MISC_FEATURE (4)..(4): X is K, R or H for basic amino acids
  MISC_FEATURE (5)..(5): X is GabaX for X2X3 or X3X2 or X2X3 or X3X2 or X3X3 or X2X2
  MISC_FEATURE (6)..(6): X is A and G
  MISC_FEATURE (7)..(7): X is F or P
  MISC_FEATURE (8)..(8): X is K, R or H for basic amino acids
  MISC_FEATURE (9)..(9): X is K, R or H for basic amino acids
  MISC_FEATURE (10)..(10): X is F or P
  MISC_FEATURE (11)..(11): X is I, L or V
  MISC_FEATURE (12)..(12): X is K, R or H for basic amino acids
  MISC_FEATURE (13)..(13): X is A and G
  MISC_FEATURE (14)..(14): X is GabaX for X2X3 or X3X2 or X2X3 or X3X2 or X3X3 or X2X2
  MISC_FEATURE (15)..(15): X is A and G
  MISC_FEATURE (16)..(16): X is GabaX for X2X3 or X3X2 or X2X3 or X3X2 or X3X3 or X2X2
XXXXXXXXXXXXXXXX

SEQ ID NO: 577 - protein, 17 aa, Artificial
  Completely synthesized peptide construct
  MISC_FEATURE (1)..(1): X is acetyl or propionyl group, D glycine or D alanine, cyclohexylalanine at amino terminus
  MISC_FEATURE (2)..(2): X is A and G
  MISC_FEATURE (3)..(3): X is N or Q for amidated amino acids
  MISC_FEATURE (4)..(4): X is F, W or Y for aromatic amino acids
  MISC_FEATURE (5)..(5): X is K, R or H for basic amino acids
  MISC_FEATURE (6)..(6): X is GabaX for X2X3 or X3X2 or X2X3 or X3X2 or X3X3 or X2X2
  MISC_FEATURE (7)..(7): X is A and G
  MISC_FEATURE (8)..(8): X is F or P
  MISC_FEATURE (9)..(9): X is K, R or H for basic amino acids
  MISC_FEATURE (10)..(10): X is K, R or H for basic amino acids
  MISC_FEATURE (11)..(11): X is F or P
  MISC_FEATURE (12)..(12): X is I, L or V
  MISC_FEATURE (13)..(13): X is K, R or H for basic amino acids
  MISC_FEATURE (14)..(14): X is A and G
  MISC_FEATURE (15)..(15): X is GabaX for X2X3 or X3X2 or X2X3 or X3X2 or X3X3 or X2X2
  MISC_FEATURE (16)..(16): X is A and G
  MISC_FEATURE (17)..(17): X is GabaX for X2X3 or X3X2 or X2X3 or X3X2 or X3X3 or X2X2
XXXXXXXXXXXXXXXXX

SEQ ID NO: 578 - protein, 21 aa, Artificial
  Completely synthesized peptide construct
  MISC_FEATURE (1)..(1): X is acetyl or propionyl group, D glycine or D alanine, cyclodexylalanine at amino terminus
  MISC_FEATURE (2)..(2): X is A and G
  MISC_FEATURE (3)..(3): X is N or Q for amidated amino acids
  MISC_FEATURE (4)..(4): X is F, W or Y for aromatic amino acids
  MISC_FEATURE (5)..(5): X is K, R or H for basic amino acids
  MISC_FEATURE (6)..(6): X is I, L or V
  MISC_FEATURE (7)..(7): X is I, L or V
  MISC_FEATURE (8)..(8): X is A and G
  MISC_FEATURE (9)..(9): X is F or P
  MISC_FEATURE (10)..(10): X is K, R or H for basic amino acids
  MISC_FEATURE (11)..(11): X is K, R or H for basic amino acids
  MISC_FEATURE (12)..(12): X is F or P
  MISC_FEATURE (13)..(13): X is I, L or V
  MISC_FEATURE (14)..(14): X is K, R or H for basic amino acids
  MISC_FEATURE (15)..(15): X is A and G
  MISC_FEATURE (16)..(16): X is I, L or V
  MISC_FEATURE (17)..(17): X is I, L or V
  MISC_FEATURE (18)..(18): X is A and G
  MISC_FEATURE (19)..(19): X is D and E for acidic amino acids
  MISC_FEATURE (20)..(20): X is D and E for acidic amino acids
  MISC_FEATURE (21)..(21): X is I, L or V
XXXXXXXXXXXXXXXXXXXXX

SEQ ID NO: 579 - protein, 21 aa, Artificial
  Completely synthesized peptide construct
  MISC_FEATURE (1)..(1): X is acetyl or propionyl group, D glycine or D alanine, cyclohexylalanine at amino terminus
  MISC_FEATURE (2)..(2): X is A and G
  MISC_FEATURE (3)..(3): X is N or Q for amidated amino acids
  MISC_FEATURE (4)..(4): X is F, W or Y for aromatic amino acids
  MISC_FEATURE (5)..(5): X is K, R or H for basic amino acids
  MISC_FEATURE (6)..(6): X is I, L or V
  MISC_FEATURE (7)..(7): X is I, L or V
  MISC_FEATURE (8)..(8): X is A and G
  MISC_FEATURE (9)..(9): X is F or P
  MISC_FEATURE (10)..(10): X is K, R or H for basic amino acids
  MISC_FEATURE (11)..(11): X is K, R or H for basic amino acids
  MISC_FEATURE (12)..(12): X is F or P
  MISC_FEATURE (13)..(13): X is I, L or V
  MISC_FEATURE (14)..(14): X is K, R or H for basic amino acids
  MISC_FEATURE (15)..(15): X is A and G
  MISC_FEATURE (16)..(16): X is I, L or V
  MISC_FEATURE (17)..(17): X is I, L or V
  MISC_FEATURE (18)..(18): X is A and G
  MISC_FEATURE (19)..(19): X is D and E for acidic amino acids
  MISC_FEATURE (20)..(20): X is D and E for acidic amino acids
  MISC_FEATURE (21)..(21): X is I, L or V
XXXXXXXXXXXXXXXXXXXXX

SEQ ID NO: 580 - protein, 20 aa, Artificial
  Completely synthesized peptide construct
  MISC_FEATURE (1)..(1): X is acetyl or propionyl group, D glycine or D alanine, cyclodexylalanine at amino terminus
  MISC_FEATURE (2)..(2): X is A and G
  MISC_FEATURE (3)..(3): X is N or Q for amidated amino terminus
  MISC_FEATURE (4)..(4): X is F, W or Y for aromatic amino acids
  MISC_FEATURE (5)..(5): X is K, R or H for basic amino acids
  MISC_FEATURE (6)..(6): X is GabaX for X2X3 or X3X2 or X2X3 or X3X2 or X3X3 or X2X2
  MISC_FEATURE (7)..(7): X is A and G
  MISC_FEATURE (8)..(8): X is F or P
  MISC_FEATURE (9)..(9): X is K, R or H for basic amino acids
  MISC_FEATURE (10)..(10): X is K, R or H for basic amino acids
  MISC_FEATURE (11)..(11): X is F or P
  MISC_FEATURE (12)..(12): X is I, L or V
  MISC_FEATURE (13)..(13): X is K, R or H for basic amino acids
  MISC_FEATURE (14)..(14): X is A and G
  MISC_FEATURE (15)..(15): X is I, L or V
  MISC_FEATURE (16)..(16): X is I, L or V
  MISC_FEATURE (17)..(17): X is A and G
  MISC_FEATURE (18)..(18): X is D and E for acidic amino acids
  MISC_FEATURE (19)..(19): X is D and E for acidic amino acids
  MISC_FEATURE (20)..(20): X is I, L or V
XXXXXXXXXXXXXXXXXXXX

SEQ ID NO: 581 - protein, 20 aa, Artificial
  Completely synthesized peptide construct
  MISC_FEATURE (1)..(1): X is acetyl or propionyl group, D glycine or D alanine, cyclohexylalanine at amino terminus
  MISC_FEATURE (2)..(2): X is A and G
  MISC_FEATURE (3)..(3): X is N or Q for amidated amino acids
  MISC_FEATURE (4)..(4): X is F, W or Y for aromatic amino acids
  MISC_FEATURE (5)..(5): X is K, R or H for basic amino acids
  MISC_FEATURE (6)..(6): X is I, L or V
  MISC_FEATURE (7)..(7): X is I, L or V
  MISC_FEATURE (8)..(8): X is A and G
  MISC_FEATURE (9)..(9): X is F or P
  MISC_FEATURE (10)..(10): X is K, R or H for basic amino acids
  MISC_FEATURE (11)..(11): X is K, R or H for basic amino acids
  MISC_FEATURE (12)..(12): X is F or P
  MISC_FEATURE (13)..(13): X is I, L or V
  MISC_FEATURE (14)..(14): X is K, R or H for basic amino acids
  MISC_FEATURE (15)..(15): X is A and G
  MISC_FEATURE (16)..(16): X is GabaX for X2X3 or X3X2 or X2X3 or X3X2 or X3X3 or X2X2
  MISC_FEATURE (17)..(17): X is A and G
  MISC_FEATURE (18)..(18): X is D and E for acidic amino acids
  MISC_FEATURE (19)..(19): X is D and E for acidic amino acids
  MISC_FEATURE (20)..(20): X is I, L or V
XXXXXXXXXXXXXXXXXXXX

SEQ ID NO: 582 - protein, 19 aa, Artificial
  Completely synthesized peptide construct
  MISC_FEATURE (1)..(1): X is acetyl or propionyl group, D glycine or D alanine, cyclohexylalanine at amino terminus
  MISC_FEATURE (2)..(2): X is A and G
  MISC_FEATURE (3)..(3): X is N or Q for amidated amino acids
  MISC_FEATURE (4)..(4): X is F, W or Y for aromatic amino acids
  MISC_FEATURE (5)..(5): X is K, R or H for basic amino acids
  MISC_FEATURE (6)..(6): X is I, L or V
  MISC_FEATURE (7)..(7): X is I, L or V
  MISC_FEATURE (8)..(8): X is A and G
  MISC_FEATURE (9)..(9): X is F or P
  MISC_FEATURE (10)..(10): X is K, R or H for basic amino acids
  MISC_FEATURE (11)..(11): X is K, R or H for basic amino acids
  MISC_FEATURE (12)..(12): X is F or P
  MISC_FEATURE (13)..(13): X is I, L or V
  MISC_FEATURE (14)..(14): X is K, R or H for basic amino acids
  MISC_FEATURE (15)..(15): X is A and G
  MISC_FEATURE (16)..(16): X is I, L or V
  MISC_FEATURE (17)..(17): X is I, L or V
  MISC_FEATURE (18)..(18): X is A and G
  MISC_FEATURE (19)..(19): X is GabaX for X2X3 or X3X2 or X2X3 or X3X2 or X3X3 or X2X2
XXXXXXXXXXXXXXXXXXX

SEQ ID NO: 583 - protein, 19 aa, Artificial
  Completely synthesized peptide construct
  MISC_FEATURE (1)..(1): X is acetyl or propionyl group, D glycine or D alanine, cyclodexylalanine at amino terminus
  MISC_FEATURE (2)..(2): X is A and G
  MISC_FEATURE (3)..(3): X is N or Q for amidated amino terminus
  MISC_FEATURE (4)..(4): X is F, W or Y for aromatic amino acids
  MISC_FEATURE (5)..(5): X is K, R or H for basic amino acids
  MISC_FEATURE (6)..(6): X is F, W or Y for aromatic amino acids
  MISC_FEATURE (7)..(7): X is A and G
  MISC_FEATURE (8)..(8): X is F or P
  MISC_FEATURE (9)..(9): X is K, R or H for basic amino acids
  MISC_FEATURE (10)..(10): X is K, R or H for basic amino acids
  MISC_FEATURE (11)..(11): X is F or P
  MISC_FEATURE (12)..(12): X is I, L or V
  MISC_FEATURE (13)..(13): X is K, R or H for basic amino acids
  MISC_FEATURE (14)..(14): X is A and G
  MISC_FEATURE (15)..(15): X is GabaX for X2X3 or X3X2 or X2X3 or X3X2 or X3X3 or X2X2
  MISC_FEATURE (16)..(16): X is A and G
  MISC_FEATURE (17)..(17): X is D and E for acidic amino acids
  MISC_FEATURE (18)..(18): X is D and E for acidic amino acids
  MISC_FEATURE (19)..(19): X is I, L or V
XXXXXXXXXXXXXXXXXXX

SEQ ID NO: 584 - protein, 17 aa, Artificial
  Completely synthesized peptide construct
  MISC_FEATURE (1)..(1): X is acetyl or propionyl group, D glycine or Dalanine, cyclohexylalanine at amino terminus
  MISC_FEATURE (2)..(2): X is A and G
  MISC_FEATURE (3)..(3): X is N or Q for amidated amino acids
  MISC_FEATURE (4)..(4): X is F, W or Y for aromatic amino acids
  MISC_FEATURE (5)..(5): X is K, R or H for basic amino acids
  MISC_FEATURE (6)..(6): X is GabaX for X2X3 or X3X2 or X2X3 or X3X2 or X3X3 or X2X2
  MISC_FEATURE (7)..(7): X is A and G
  MISC_FEATURE (8)..(8): X is F or P
  MISC_FEATURE (9)..(9): X is K, R or H for basic amino acids
  MISC_FEATURE (10)..(10): X is F or P
  MISC_FEATURE (11)..(11): X is I, L or V
  MISC_FEATURE (12)..(12): X is K, R or H for basic amino acids
  MISC_FEATURE (13)..(13): X is K, R or H for basic amino acids
  MISC_FEATURE (14)..(14): X is A and G
  MISC_FEATURE (15)..(15): X is GabaX for X2X3 or X3X2 or X2X3 or X3X2 or X3X3 or X2X2
  MISC_FEATURE (16)..(16): X is A and G
  MISC_FEATURE (17)..(17): X is GabaX for X2X3 or X3X2 or X2X3 or X3X2 or X3X3 or X2X2
XXXXXXXXXXXXXXXXX

SEQ ID NO: 585 - protein, 18 aa, Artificial
  Completely synthesized peptide construct
  MISC_FEATURE (1)..(1): X is acetyl or propionyl group, D glycine or D alanine, cyclodexylalanine at amino terminus
  MISC_FEATURE (2)..(2): X is A and G
  MISC_FEATURE (3)..(3): X is N or Q for amidated amino acids
  MISC_FEATURE (4)..(4): X is F, W or Y for aromatic amino acids
  MISC_FEATURE (5)..(5): X is K, R or H for basic amino acids
  MISC_FEATURE (6)..(6): X is GabaX for X2X3 or X3X2 or X2X3 or X3X2 or X3X3 or X2X2
  MISC_FEATURE (7)..(7): X is A and G
  MISC_FEATURE (8)..(8): X is F or P
  MISC_FEATURE (9)..(9): X is K, R or H for basic amino acids
  MISC_FEATURE (10)..(10): X is K, R or H for basic amino acids
  MISC_FEATURE (11)..(11): X is F or P
  MISC_FEATURE (12)..(12): X is I, L or V
  MISC_FEATURE (13)..(13): X is K, R or H for basic amino acids
  MISC_FEATURE (14)..(14): X is A and G
  MISC_FEATURE (15)..(15): X is I, L or V
  MISC_FEATURE (16)..(16): X is I, L or V
  MISC_FEATURE (17)..(17): X is A and G
  MISC_FEATURE (18)..(18): X is GabaX for X2X3 or X3X2 or X2X3 or X3X2 or X3X3 or X2X2
XXXXXXXXXXXXXXXXXX

SEQ ID NO: 586 - protein, 20 aa, Artificial
  Completely synthesized peptide construct
NATGMEVGWYRPPFSRVVHL

SEQ ID NO: 587 - protein, 20 aa, Artificial
  Completely synthesized peptide construct
  MISC_FEATURE (1)..(1): X is N or Q for amidated amino acids
  MISC_FEATURE (2)..(2): X is A and G
  MISC_FEATURE (3)..(3): X is T or S
  MISC_FEATURE (4)..(4): X is A and G
  MISC_FEATURE (5)..(5): X is M or Nle (Norleucine)
  MISC_FEATURE (6)..(6): X is D and E for acidic amino acids
  MISC_FEATURE (7)..(7): X is I, L or V
  MISC_FEATURE (8)..(8): X is A and G
  MISC_FEATURE (9)..(9): X is F, W or Y for aromatic amino acids
  MISC_FEATURE (10)..(10): X is F, W or Y for aromatic amino acids
  MISC_FEATURE (11)..(11): X is K, R or H for basic amino acids
  MISC_FEATURE (12)..(12): X is F or P
  MISC_FEATURE (13)..(13): X is F or P
  MISC_FEATURE (14)..(14): X is F or P
  MISC_FEATURE (15)..(15): X is T or S
  MISC_FEATURE (16)..(16): X is K, R or H for basic amino acids
  MISC_FEATURE (17)..(17): X is I, L or V
  MISC_FEATURE (18)..(18): X is I, L or V
  MISC_FEATURE (19)..(19): X is K, R or H for basic amino acids
  MISC_FEATURE (20)..(20): X is I, L or V
XXXXXXXXXXXXXXXXXXXX

SEQ ID NO: 588 - protein, 19 aa, Artificial
  Completely synthesized peptide construct
  MISC_FEATURE (1)..(1): X is N or Q for amidated amino acids
  MISC_FEATURE (2)..(2): X is A and G
  MISC_FEATURE (3)..(3): X is T or S
  MISC_FEATURE (4)..(4): X is A and G
  MISC_FEATURE (5)..(5): X is M or Nle (Norleucine)
  MISC_FEATURE (6)..(6): X is GabaX for X2X3 or X3X2 or X2X3 or X3X2 or X3X3 or X2X2
  MISC_FEATURE (7)..(7): X is A and G
  MISC_FEATURE (8)..(8): X is F, W or Y for aromatic amino acids
  MISC_FEATURE (9)..(9): X is F, W or Y for aromatic amino acids
  MISC_FEATURE (10)..(10): X is K, R or H for basic amino acids
  MISC_FEATURE (11)..(11): X is F or P
  MISC_FEATURE (12)..(12): X is F or P
  MISC_FEATURE (13)..(13): X is F or P
  MISC_FEATURE (14)..(14): X is T or S
  MISC_FEATURE (15)..(15): X is K, R or H for basic amino acids
  MISC_FEATURE (16)..(16): X is I, L or V
  MISC_FEATURE (17)..(17): X is I, L or V
  MISC_FEATURE (18)..(18): X is K, R or H for basic amino acids
  MISC_FEATURE (19)..(19): X is I, L or V
XXXXXXXXXXXXXXXXXXX

SEQ ID NO: 589 - protein, 19 aa, Artificial
  Completely synthesized peptide construct
  MISC_FEATURE (1)..(1): X is N or Q for amidated amino acids
  MISC_FEATURE (2)..(2): X is A and G
  MISC_FEATURE (3)..(3): X is T or S
  MISC_FEATURE (4)..(4): X is A and G
  MISC_FEATURE (5)..(5): X is M or Nle (Norleucine)
  MISC_FEATURE (6)..(6): X is D and E for acidic amino acids
  MISC_FEATURE (7)..(7): X is I, L or V
  MISC_FEATURE (8)..(8): X is A and G
  MISC_FEATURE (9)..(9): X is F, W or Y for aromatic amino acids
  MISC_FEATURE (10)..(10): X is F, W or Y for aromatic amino acids
  MISC_FEATURE (11)..(11): X is K, R or H for basic amino acids
  MISC_FEATURE (12)..(12): X is F or P
  MISC_FEATURE (13)..(13): X is F or P
  MISC_FEATURE (14)..(14): X is F or P
  MISC_FEATURE (15)..(15): X is T or S
  MISC_FEATURE (16)..(16): X is K, R or H for basic amino acids
  MISC_FEATURE (17)..(17): X is GabaX for X2X3 or X3X2 or X2X3 or X3X2 or X3X3 or X2X2
  MISC_FEATURE (18)..(18): X is K, R or H for basic amino acids
  MISC_FEATURE (19)..(19): X is I, L or V
XXXXXXXXXXXXXXXXXXX

SEQ ID NO: 590 - protein, 18 aa, Artificial
  Completely synthesized peptide construct
  MISC_FEATURE (1)..(1): X is N or Q for amidated amino acids
  MISC_FEATURE (2)..(2): X is A and G
  MISC_FEATURE (3)..(3): X is T or S
  MISC_FEATURE (4)..(4): X is A and G
  MISC_FEATURE (5)..(5): X is M or Nle (Norleucine)
  MISC_FEATURE (6)..(6): X is GabaX for X2X3 or X3X2 or X2X3 or X3X2 or X3X3 or X2X2
  MISC_FEATURE (7)..(7): X is A and G
  MISC_FEATURE (8)..(8): X is F, W or Y for aromatic amino acids
  MISC_FEATURE (9)..(9): X is F, W or Y for aromatic amino acids
  MISC_FEATURE (10)..(10): X is K, R or H for basic amino acids
  MISC_FEATURE (11)..(11): X is F or P
  MISC_FEATURE (12)..(12): X is F or P
  MISC_FEATURE (13)..(13): X is F or P
  MISC_FEATURE (14)..(14): X is T or S
  MISC_FEATURE (15)..(15): X is K, R or H for basic amino acids
  MISC_FEATURE (16)..(16): X is GabaX for X2X3 or X3X2 or X2X3 or X3X2 or X3X3 or X2X2
  MISC_FEATURE (17)..(17): X is K, R or H for basic amino acids
  MISC_FEATURE (18)..(18): X is D and E for acidic amino acids
XXXXXXXXXXXXXXXXXX

SEQ ID NO: 591 - protein, 21 aa, Artificial
  Completely synthesized peptide construct
  MISC_FEATURE (1)..(1): X is acetyl or propionyl group, D glycine or D alanine, cyclohexylalanine at amino terminus
  MISC_FEATURE (2)..(2): X is N or Q for amidated amino acids
  MISC_FEATURE (3)..(3): X is A and G
  MISC_FEATURE (4)..(4): X is T or S
  MISC_FEATURE (5)..(5): X is A and G
  MISC_FEATURE (6)..(6): X is M or Nle (Norleucine)
  MISC_FEATURE (7)..(7): X is D and E for acidic amino acids
  MISC_FEATURE (8)..(8): X is I, L or V
  MISC_FEATURE (9)..(9): X is A and G
  MISC_FEATURE (10)..(10): X is F, W or Y for aromatic amino acids
  MISC_FEATURE (11)..(11): X is F, W or Y for aromatic amino acids
  MISC_FEATURE (12)..(12): X is K, R or H for basic amino acids
  MISC_FEATURE (13)..(13): X is F or P
  MISC_FEATURE (14)..(14): X is F or P
  MISC_FEATURE (15)..(15): X is F or P
  MISC_FEATURE (16)..(16): X is T or S
  MISC_FEATURE (17)..(17): X is K, R or H for basic amino acids
  MISC_FEATURE (18)..(18): X is I, L or V
  MISC_FEATURE (19)..(19): X is I, L or V
  MISC_FEATURE (20)..(20): X is K, R or H for basic amino acids
  MISC_FEATURE (21)..(21): X is I, L or V
XXXXXXXXXXXXXXXXXXXXX

SEQ ID NO: 592 - protein, 20 aa, Artificial
  Completely synthesized peptide construct
  MISC_FEATURE (1)..(1): X is acetyl or propionyl group, D glycine or D alanine, cyclohexylalanine at amino terminus
  MISC_FEATURE (2)..(2): X is N or Q for amidated amino acids
  MISC_FEATURE (3)..(3): X is A and G
  MISC_FEATURE (4)..(4): X is T or S
  MISC_FEATURE (5)..(5): X is A and G
  MISC_FEATURE (6)..(6): X is M or Nle (Norleucine)
  MISC_FEATURE (7)..(7): X is GabaX for X2X3 or X3X2 or X2X3 or X3X2 or X3X3 or X2X2
  MISC_FEATURE (8)..(8): X is A and G
  MISC_FEATURE (9)..(9): X is F, W or Y for aromatic amino acids
  MISC_FEATURE (10)..(10): X is F, W or Y for aromatic amino acids
  MISC_FEATURE (11)..(11): X is K, R or H for basic amino acids
  MISC_FEATURE (12)..(12): X is F or P
  MISC_FEATURE (13)..(13): X is F or P
  MISC_FEATURE (14)..(14): X is F or P
  MISC_FEATURE (15)..(15): X is T or S
  MISC_FEATURE (16)..(16): X is K, R or H for basic amino acids
  MISC_FEATURE (17)..(17): X is I, L or V
  MISC_FEATURE (18)..(18): X is I, L or V
  MISC_FEATURE (19)..(19): X is K, R or H for basic amino acids
  MISC_FEATURE (20)..(20): X is I, L or V
XXXXXXXXXXXXXXXXXXXX

SEQ ID NO: 593 - protein, 20 aa, Artificial
  Completely synthesized peptide construct
  MISC_FEATURE (1)..(1): X is acetyl or propionyl group, D glycine or D alanine, cyclohexylalanine at amino terminus
  MISC_FEATURE (2)..(2): X is N or Q for amidated amino acids
  MISC_FEATURE (3)..(3): X is A and G
  MISC_FEATURE (4)..(4): X is T or S
  MISC_FEATURE (5)..(5): X is A and G
  MISC_FEATURE (6)..(6): X is M or Nle (Norleucine)
  MISC_FEATURE (7)..(7): X is D and E for acidic amino acids
  MISC_FEATURE (8)..(8): X is I, L or V
  MISC_FEATURE (9)..(9): X is A and G
  MISC_FEATURE (10)..(10): X is F, W or Y for aromatic amino acids
  MISC_FEATURE (11)..(11): X is F, W or Y for aromatic amino acids
  MISC_FEATURE (12)..(12): X is K, R or H for basic amino acids
  MISC_FEATURE (13)..(13): X is F or P
  MISC_FEATURE (14)..(14): X is F or P
  MISC_FEATURE (15)..(15): X is F or P
  misc_feature (16)..(16): Xaa can be any naturally occurring amino acid
  MISC_FEATURE (17)..(17): X is K, R or H for basic amino acids
  MISC_FEATURE (18)..(18): X is GabaX for X2X3 or X3X2 or X2X3 or X3X2 or X3X3 or X2X2
  MISC_FEATURE (19)..(19): X is K, R or H for basic amino acids
  MISC_FEATURE (20)..(20): X is I, l or V
XXXXXXXXXXXXXXXXXXXX

SEQ ID NO: 594 - protein, 19 aa, Artificial
  Completely synthesized peptide construct
  MISC_FEATURE (1)..(1): X is acetyl or propionyl group, D glycine or D alanine, cyclohexylalanine at amino terminus
  MISC_FEATURE (2)..(2): X is N or Q for amidated amino acids
  MISC_FEATURE (3)..(3): X is A and G
  MISC_FEATURE (4)..(4): X is T or S
  MISC_FEATURE (5)..(5): X is A and G
  MISC_FEATURE (6)..(6): X is M or Nle (Norleucine)
  MISC_FEATURE (7)..(7): X is GabaX for X2X3 or X3X3 or X2X3 or X3X2 or X3X3 or X2X2
  MISC_FEATURE (8)..(8): X is A and G
  MISC_FEATURE (9)..(9): X is F, W or Y for aromatic amino acids
  MISC_FEATURE (10)..(10): X is F, W or Y for aromatic amino acids
  MISC_FEATURE (11)..(11): X is F, W or Y for aromatic amino acids
  MISC_FEATURE (11)..(11): X is K, R or H for basic amino acids
  MISC_FEATURE (12)..(12): X is F or P
  MISC_FEATURE (13)..(13): X is F or P
  MISC_FEATURE (14)..(14): X is F or P
  MISC_FEATURE (15)..(15): X is T or S
  MISC_FEATURE (16)..(16): X is K, R or H for basic amino acids
  MISC_FEATURE (17)..(17): X is GabaX for X2X3 or X3X2 or X2X3 or X3X2 or X3X3 or X2X2
  MISC_FEATURE (18)..(18): X is K, R or H for basic amino acids
  MISC_FEATURE (19)..(19): X is I, L or V
XXXXXXXXXXXXXXXXXXX

SEQ ID NO: 595 - protein, 20 aa, Artificial
  Completely synthesized peptide construct
QAPEYRGRTELLKDAIGEGK

SEQ ID NO: 596 - protein, 20 aa, Artificial
  Completely synthesized peptide construct
  MISC_FEATURE (1)..(1): X is N or Q for amidated amino acids
  MISC_FEATURE (2)..(2): X is A and G
  MISC_FEATURE (3)..(3): X is F or P
  MISC_FEATURE (4)..(4): X is D and E for acidic amino acids
  MISC_FEATURE (5)..(5): X is F, W or Y for aromatic amino acids
  MISC_FEATURE (6)..(6): X is K, R or H for basic amino acids
  MISC_FEATURE (7)..(7): X is A and G
  MISC_FEATURE (8)..(8): X is K, R or H for basic amino acids
  MISC_FEATURE (9)..(9): X is T or S
  MISC_FEATURE (10)..(10): X is D and E for acidic amino acids
  MISC_FEATURE (11)..(11): X is I, L or V
  MISC_FEATURE (12)..(12): X is I, L or V
  MISC_FEATURE (13)..(13): X is K, R or H for basic amino acids
  MISC_FEATURE (14)..(14): X is D and E for acidic amino acids
  MISC_FEATURE (15)..(15): X is A and G
  MISC_FEATURE (16)..(16): X is I, L or V
  MISC_FEATURE (17)..(17): X is A and G
  MISC_FEATURE (18)..(18): X is D and E for acidic amino acids
  MISC_FEATURE (19)..(19): X is A and G
  MISC_FEATURE (20)..(20): X is K, R or H for basic amino acids
XXXXXXXXXXXXXXXXXXXX

SEQ ID NO: 597 - protein, 19 aa, Artificial
  Completely synthesized peptide construct
  MISC_FEATURE (1)..(1): X is N or Q for amidated amino acids
  MISC_FEATURE (2)..(2): X is A and G
  MISC_FEATURE (3)..(3): X is F or P
  MISC_FEATURE (4)..(4): X is D and E for acidic amino acids
  MISC_FEATURE (5)..(5): X is F, W or Y for aromatic amino acids
  MISC_FEATURE (6)..(6): X is K, R or H for basic amino acids
  MISC_FEATURE (7)..(7): X is A and G
  MISC_FEATURE (8)..(8): X is K, R or H for basic amino acids
  MISC_FEATURE (9)..(9): X is T or S
  MISC_FEATURE (10)..(10): X is GabaX for X2X3 or X3X2 or X2X3 orX3X2 or X3X3 or X2X2
  MISC_FEATURE (11)..(11): X is I, L or V
  MISC_FEATURE (12)..(12): X is K, R or H for basic amino acids
  MISC_FEATURE (13)..(13): X is D and E for acidic amino acids
  MISC_FEATURE (14)..(14): X is A and G
  MISC_FEATURE (15)..(15): X is I, L or V
  MISC_FEATURE (16)..(16): X is A and G
  MISC_FEATURE (17)..(17): X is D and E for acidic amino acids
  MISC_FEATURE (18)..(18): X is A and G
  MISC_FEATURE (19)..(19): X is K, R or H for basic amino acids
XXXXXXXXXXXXXXXXXXX

SEQ ID NO: 598 - protein, 18 aa, Artificial
  Completely synthesized peptide construct
  MISC_FEATURE (1)..(1): X is N or Q for amidated amino acids
  MISC_FEATURE (2)..(2): X is A and G
  MISC_FEATURE (3)..(3): X is F or P
  MISC_FEATURE (4)..(4): X is D and E for acidic amino acids
  MISC_FEATURE (5)..(5): X is F, W or Y for aromatic amino acids
  MISC_FEATURE (6)..(6): X is K, R or H for basic amino acids
  MISC_FEATURE (7)..(7): X is A and G
  MISC_FEATURE (8)..(8): X is K, R or H for basic amino acids
  MISC_FEATURE (9)..(9): X is T or S
  MISC_FEATURE (10)..(10): X is 5-aminopentanoic acid for replacement of 3 or 4 amino acids of X2 and X3
  MISC_FEATURE (11)..(11): X is K, R or H for basic amino acids
  MISC_FEATURE (12)..(12): X is D and E for acidic amino acids
  MISC_FEATURE (13)..(13): X is A and G
  MISC_FEATURE (14)..(14): X is I, L or V
  MISC_FEATURE (15)..(15): X is A and G
  MISC_FEATURE (16)..(16): X is A and G
  MISC_FEATURE (16)..(16): X is D and E for acidic amino acids
  MISC_FEATURE (17)..(17): X is A and G
  MISC_FEATURE (18)..(18): X is K, R or H for basic amino acids
XXXXXXXXXXXXXXXXXX

SEQ ID NO: 599 - protein, 21 aa, Artificial
  Completely synthesized peptide construct
  MISC_FEATURE (1)..(1): X is acetyl or propionyl group, D glycine or D alanine, cyclohexylalanine at amino terminus
  MISC_FEATURE (2)..(2): X is N or Q for amidated amino acids
  MISC_FEATURE (3)..(3): X is A and G
  MISC_FEATURE (4)..(4): X is F or P
  MISC_FEATURE (5)..(5): X is D and E for acidic amino acids
  MISC_FEATURE (6)..(6): X is F, W or Y for aromatic amino acids
  MISC_FEATURE (7)..(7): X is K, R or H for basic amino acids
  MISC_FEATURE (8)..(8): X is A and G
  MISC_FEATURE (9)..(9): X is K, R or H for basic amino acids
  MISC_FEATURE (10)..(10): X is T or S
  MISC_FEATURE (11)..(11): X is D and E for acidic amino acids
  MISC_FEATURE (12)..(12): X is I, L or V
  MISC_FEATURE (13)..(13): X is I, L or V
  MISC_FEATURE (14)..(14): X is K, R or H for basic amino acids
  MISC_FEATURE (15)..(15): X is D and E for acidic amino acids
  MISC_FEATURE (16)..(16): X is A and G
  MISC_FEATURE (17)..(17): X is I, L or V
  MISC_FEATURE (18)..(18): X is A and G
  MISC_FEATURE (19)..(19): X is D and E for acidic amino acids
  MISC_FEATURE (20)..(20): X is A and G
  MISC_FEATURE (21)..(21): X is K, R or H for basic amino acids
XXXXXXXXXXXXXXXXXXXXX

SEQ ID NO: 600 - protein, 20 aa, Artificial
  Completely synthesized peptide construct
  MISC_FEATURE (1)..(1): X is acetyl or propionyl group, D glycine or D alanine, cyclohexylalanine at amino terminus
  MISC_FEATURE (2)..(2): X is N or Q for amidated amino acids
  MISC_FEATURE (3)..(3): X is A and G
  MISC_FEATURE (4)..(4): X is F or P
  MISC_FEATURE (5)..(5): X is D and E for acidic amino acids
  MISC_FEATURE (6)..(6): X is F, W or Y for aromatic amino acids
  MISC_FEATURE (7)..(7): X is K, R or H for basic amino acids
  MISC_FEATURE (8)..(8): X is A and G
  MISC_FEATURE (9)..(9): X is K, R or H for basic amino acids
  MISC_FEATURE (10)..(10): X is T or S
  MISC_FEATURE (11)..(11): X is GabaX for X2X3 or X3X2 or X2X3 or X3X2 or X3X3 or X2X2
  MISC_FEATURE (12)..(12): X is  I, L or V
  MISC_FEATURE (13)..(13): X is K, R or H for basic amino acids
  MISC_FEATURE (14)..(14): X is D and E for acidic amino acids
  MISC_FEATURE (15)..(15): X is A and G
  MISC_FEATURE (16)..(16): X is I, L or V
  MISC_FEATURE (17)..(17): X is A and G
  MISC_FEATURE (18)..(18): X is D and E for acidic amino acids
  MISC_FEATURE (19)..(19): X is A and G
  MISC_FEATURE (20)..(20): X is K, R or H for basic amino acids
XXXXXXXXXXXXXXXXXXXX

SEQ ID NO: 601 - protein, 19 aa, Artificial
  Completely synthesized peptide construct
  MISC_FEATURE (1)..(1): X is acetyl or propionyl group, D glycine or D alanine, cyclohexylalanine at amino terminus
  MISC_FEATURE (2)..(2): X is N or Q for amidated amino acids
  MISC_FEATURE (3)..(3): X is A and G
  MISC_FEATURE (4)..(4): X is F or P
  MISC_FEATURE (5)..(5): X is D and E for acidic amino acids
  MISC_FEATURE (6)..(6): X is F, W or Y for aromatic amino acids
  MISC_FEATURE (7)..(7): X is K, R or H for basic amino acids
  MISC_FEATURE (8)..(8): X is A and G
  MISC_FEATURE (9)..(9): X is K, R or H for basic amino acids
  MISC_FEATURE (10)..(10): X is T or S
  MISC_FEATURE (11)..(11): X is 5-aminopentanoic acid for replacement of 3 or 4 amino acids of X2and X3
  MISC_FEATURE (12)..(12): X is K, R or H for basic amino acids
  MISC_FEATURE (13)..(13): X is D and E for acidic amino acids
  MISC_FEATURE (14)..(14): X is A and G
  MISC_FEATURE (15)..(15): X is I, L or V
  MISC_FEATURE (16)..(16): X is A and G
  MISC_FEATURE (17)..(17): X is D and E for acidic amino acids
  MISC_FEATURE (18)..(18): X is A and G
  MISC_FEATURE (19)..(19): X is K, R or H for basic amino acids
XXXXXXXXXXXXXXXXXXX

SEQ ID NO: 602 - protein, 20 aa, Artificial
  Completely synthesized peptide construct
SDEGGFTCFFRDHSYQEEAA

SEQ ID NO: 603 - protein, 20 aa, Artificial
  Completely synthesized peptide construct
  MISC_FEATURE (1)..(1): X is T or S
  MISC_FEATURE (2)..(2): X is D and E for acidic amino acids
  MISC_FEATURE (3)..(3): X is A and G
  MISC_FEATURE (4)..(4): X is A and G
  MISC_FEATURE (5)..(5): X is A and G
  MISC_FEATURE (6)..(6): X is T or S
  MISC_FEATURE (7)..(7): X is T or S
  MISC_FEATURE (8)..(8): X is C or S
  MISC_FEATURE (9)..(9): X is F or P
  MISC_FEATURE (10)..(10): X is F or P
  MISC_FEATURE (11)..(11): X is K, R or H for basic amino acids
  MISC_FEATURE (12)..(12): X is D and E for acidic amino acids
  MISC_FEATURE (13)..(13): X is K, R or H for basic amino acids
  MISC_FEATURE (14)..(14): X is T or S
  MISC_FEATURE (15)..(15): X is F, W or Y for aromatic amino acids
  MISC_FEATURE (16)..(16): X is N or Q for amidated amino acids
  MISC_FEATURE (17)..(17): X is D and E for acidic amino acids
  MISC_FEATURE (18)..(18): X is D and E for acidic amino acids
  MISC_FEATURE (19)..(19): X is A and G
  MISC_FEATURE (20)..(20): X is A and G
XXXXXXXXXXXXXXXXXXXX

SEQ ID NO: 604 - protein, 19 aa, Artificial
  Completely synthesized peptide construct
  MISC_FEATURE (1)..(1): X is T or S
  MISC_FEATURE (2)..(2): X is GabaX for X2X3 or X3X2 or X2X3 or X3X2 or X3X3 or X2X2
  MISC_FEATURE (3)..(3): X is A and G
  MISC_FEATURE (4)..(4): X is A and G
  MISC_FEATURE (5)..(5): X is F or P
  MISC_FEATURE (6)..(6): X is T or S
  MISC_FEATURE (7)..(6): X is C or S
  misc_feature (7)..(7): Xaa can be any naturally occurring amino acid
  MISC_FEATURE (8)..(8): X is F or P
  MISC_FEATURE (9)..(9): X is F or P
  MISC_FEATURE (10)..(10): X is K, R or H for basic amino acids
  MISC_FEATURE (11)..(11): X is D and E for acidic amino acids
  MISC_FEATURE (12)..(12): X is K, R or H for basic amino acids
  MISC_FEATURE (13)..(13): X is T or S
  MISC_FEATURE (14)..(14): X is F, W for Y for aromatic amino acids
  MISC_FEATURE (15)..(15): X is N or Q for amidated amino acids
  MISC_FEATURE (16)..(16): X is D and E for acidic amino acids
  MISC_FEATURE (17)..(17): X is D and E for acidic amino acids
  MISC_FEATURE (18)..(18): X is A and G
  MISC_FEATURE (19)..(19): X is A and G
XXXXXXXXXXXXXXXXXXX

SEQ ID NO: 605 - protein, 19 aa, Artificial
  Completely synthesized peptide construct
  MISC_FEATURE (1)..(1): X is T or S
  MISC_FEATURE (2)..(2): X is D and E for acidic amino acids
  MISC_FEATURE (3)..(3): X is D and E for acidic amino acids
  MISC_FEATURE (4)..(4): X is A and G
  MISC_FEATURE (5)..(5): X is A and G
  MISC_FEATURE (6)..(6): X is F or P
  MISC_FEATURE (7)..(7): X is T or S
  MISC_FEATURE (8)..(8): X is C or S
  MISC_FEATURE (9)..(9): X is F or P
  MISC_FEATURE (10)..(10): X is F or P
  MISC_FEATURE (11)..(11): X is K, R or H for basic amino acids
  MISC_FEATURE (12)..(12): X is D and E for acidic amino acids
  MISC_FEATURE (13)..(13): X is K, R or H for basic amino acids
  MISC_FEATURE (14)..(14): X is T or S
  MISC_FEATURE (15)..(15): X is F, W or Y for aromatic amino acids
  MISC_FEATURE (16)..(16): X is N or Q for amidated amino acids
  MISC_FEATURE (17)..(17): X is GabaX for X2X3 or X3X2 or X2X3 or X3X2 or X3X3 or X2X2
  MISC_FEATURE (18)..(18): X is A and G
  MISC_FEATURE (19)..(19): X is A and G
XXXXXXXXXXXXXXXXXXX

SEQ ID NO: 606 - protein, 18 aa, Artificial
  Completely synthesized peptide construct
  MISC_FEATURE (1)..(1): X is T or S
  MISC_FEATURE (2)..(2): X is GabaX for X2X3 or X3X2 or X2X3 or X3X2 or X3X3 or X2X2
  MISC_FEATURE (3)..(3): X is A and G
  MISC_FEATURE (4)..(4): X is A and G
  MISC_FEATURE (5)..(5): X is F or P
  MISC_FEATURE (6)..(6): X is T or S
  MISC_FEATURE (7)..(7): X is C or S
  MISC_FEATURE (8)..(8): X is F or P
  MISC_FEATURE (9)..(9): X is F or P
  MISC_FEATURE (10)..(10): X is K, R or H for basic amino acids
  MISC_FEATURE (11)..(11): X is D and E for acidic amino acids
  MISC_FEATURE (12)..(12): X is K, R or H for basic amino acids
  MISC_FEATURE (13)..(13): X is T or S
  MISC_FEATURE (14)..(14): X is F, W or Y for aromatic amino acids
  MISC_FEATURE (15)..(15): X is N or Q for amidated amino acids
  MISC_FEATURE (16)..(16): X is GabaX for X2X3 or X3X2 or X2X3 or X3X2 or X3X3 or X2X2
  MISC_FEATURE (17)..(17): X is A and G
  MISC_FEATURE (18)..(18): X is A and G
XXXXXXXXXXXXXXXXXX

SEQ ID NO: 607 - protein, 21 aa, Artificial
  Completely synthesized peptide construct
  MISC_FEATURE (1)..(1): X is acetyl or propionyl group, D glycine or D alanine, cyclohexylalanine at amino terminus
  MISC_FEATURE (2)..(2): X is T or S
  MISC_FEATURE (3)..(3): X is D and E for acidic amino acids
  MISC_FEATURE (4)..(4): X is D and E for acidic amino acids
  MISC_FEATURE (5)..(5): X is A and G
  MISC_FEATURE (6)..(6): X is A and G
  MISC_FEATURE (7)..(7): X is F or P
  MISC_FEATURE (8)..(8): X is T or S
  MISC_FEATURE (9)..(9): X is C or S
  MISC_FEATURE (10)..(10): X is F or P
  MISC_FEATURE (11)..(11): X is F or P
  MISC_FEATURE (12)..(12): X is K, R or H for basic amino acids
  MISC_FEATURE (13)..(13): X is D and E for acidic amino acids
  MISC_FEATURE (14)..(14): X is K, R or H for basic amino acids
  MISC_FEATURE (15)..(15): X is T or S
  MISC_FEATURE (16)..(16): X is F, W or Y for aromatic amino acids
  MISC_FEATURE (17)..(17): X is N or Q for amidated amino acids
  MISC_FEATURE (18)..(18): X is D and E for acidic amino acids
  MISC_FEATURE (19)..(19): X is D and E for acidic amino acids
  MISC_FEATURE (20)..(20): X is A and G
  MISC_FEATURE (21)..(21): X is A and G
XXXXXXXXXXXXXXXXXXXXX

SEQ ID NO: 608 - protein, 20 aa, Artificial
  Completely synthesized peptide construct
  MISC_FEATURE (1)..(1): X is acetyl or propionyl group, D glycine or D alanine, cyclohexylalanine at amino terminus
  MISC_FEATURE (2)..(2): X is T or S
  MISC_FEATURE (3)..(3): X is GabaX for X2X3 or X3X2 or X2X3 or X3X2 or X3X3 or X2X2
  MISC_FEATURE (4)..(4): X is A and G
  MISC_FEATURE (5)..(5): X is A and G
  MISC_FEATURE (6)..(6): X is F or P
  MISC_FEATURE (7)..(7): X is T or S
  MISC_FEATURE (8)..(8): X is C or S
  MISC_FEATURE (9)..(9): X is F or P
  MISC_FEATURE (10)..(10): X is F or P
  MISC_FEATURE (11)..(11): X is K, R or H for basic amino acids
  MISC_FEATURE (12)..(12): X is D and E for acidic amino acids
  MISC_FEATURE (13)..(13): X is K, R or H for basic amino acids
  MISC_FEATURE (14)..(14): X is T or S
  MISC_FEATURE (15)..(15): X is F, W or Y for aromatic amino acids
  MISC_FEATURE (16)..(16): X is N or Q for amidated amino acids
  MISC_FEATURE (17)..(17): X is D and E for acidic amino acids
  MISC_FEATURE (18)..(18): X is D and E for acidic amino acids
  MISC_FEATURE (19)..(19): X is A and G
  MISC_FEATURE (20)..(20): X is A and G
XXXXXXXXXXXXXXXXXXXX

SEQ ID NO: 609 - protein, 20 aa, Artificial
  Completely synthesized peptide construct
  MISC_FEATURE (1)..(1): X is acetyl or propionyl group, D glycine or D alanine, cyclohexylalanine at amino terminus
  MISC_FEATURE (2)..(2): X is T or S
  MISC_FEATURE (3)..(3): X is D and E for acidic amino acids
  MISC_FEATURE (4)..(4): X is D and E for acidic amino acids
  MISC_FEATURE (5)..(5): X is A and G
  MISC_FEATURE (6)..(6): X is A and G
  MISC_FEATURE (7)..(7): X is F or P
  MISC_FEATURE (8)..(8): X is T or S
  MISC_FEATURE (9)..(9): X is C or S
  MISC_FEATURE (10)..(10): X is F or P
  MISC_FEATURE (11)..(11): X is F or P
  MISC_FEATURE (12)..(12): X is K, R or H for basic amino acids
  MISC_FEATURE (13)..(13): X is D and E for acidic amino acids
  MISC_FEATURE (14)..(14): X is K, R or H for basic amino acids
  MISC_FEATURE (15)..(15): X is T or S
  MISC_FEATURE (16)..(16): X is F, W or Y for aromatic amino acids
  MISC_FEATURE (17)..(17): X is N or Q for amidated amino acids
  MISC_FEATURE (18)..(18): X is GabaX for X2X3 or X3X2 or X2X3 or X3X2 or X3X3 or X2X2
  MISC_FEATURE (19)..(19): X is A and G
  MISC_FEATURE (20)..(20): X is A and G
XXXXXXXXXXXXXXXXXXXX

SEQ ID NO: 610 - protein, 19 aa, Artificial
  Completely synthesized peptide construct
  MISC_FEATURE (1)..(1): X is acetyl or propionyl group, D glycine or D alanine, cyclohexylalanine at amino terminus
  MISC_FEATURE (2)..(2): X is T or S
  MISC_FEATURE (3)..(3): X is GabaX for X2X3 or X3X2 or X2X3 or X3X2 or X3X3 or X2X2
  MISC_FEATURE (4)..(4): X is A and G
  MISC_FEATURE (5)..(5): X is A and G
  MISC_FEATURE (6)..(6): X is F or P
  MISC_FEATURE (7)..(7): X is T or S
  MISC_FEATURE (8)..(8): X is C or S
  MISC_FEATURE (9)..(9): X is F or P
  MISC_FEATURE (10)..(10): X is F or P
  MISC_FEATURE (11)..(11): X is K, R or H for basic amino acids
  MISC_FEATURE (12)..(12): X is D and E for acidic amino acids
  MISC_FEATURE (13)..(13): X is K, R or H for basic amino acids
  MISC_FEATURE (14)..(14): X is T or S
  MISC_FEATURE (15)..(15): X is F, W or Y for aromatic amino acids
  MISC_FEATURE (16)..(16): X is N or Q for amidated amino acids
  MISC_FEATURE (17)..(17): X is GabaX for X2X3 or X3X2 or X2X3 or X3X2 or X3X3 or X2X2
  MISC_FEATURE (18)..(18): X is A andG
  MISC_FEATURE (19)..(19): X is A andG
XXXXXXXXXXXXXXXXXXX

SEQ ID NO: 611 - protein, 15 aa, Artificial
  Completely synthesized peptide construct
ENPVVHFFKNIVTPR

SEQ ID NO: 612 - protein, 15 aa, Artificial
  Completely synthesized peptide construct
  MISC_FEATURE (1)..(1): X is D and E for acidic amino acids
  MISC_FEATURE (2)..(2): X is N or Q for amidated amino acids
  MISC_FEATURE (3)..(3): X is F or P
  MISC_FEATURE (4)..(4): X is I, L or V
  MISC_FEATURE (5)..(5): X is I, L or V
  MISC_FEATURE (6)..(6): X is K, R or H for basic amino acids
  MISC_FEATURE (7)..(7): X is F, W or Y for aromatic amino acids
  MISC_FEATURE (8)..(8): X is F, W or Y for aromatic amino acids
  MISC_FEATURE (9)..(9): X is K, R or H for basic amino acids
  MISC_FEATURE (10)..(10): X is N or Q for amidated amino acids
  MISC_FEATURE (11)..(11): X is I, L or V
  MISC_FEATURE (12)..(12): X is I, L or V
  MISC_FEATURE (13)..(13): X is T or S
  MISC_FEATURE (14)..(14): X is F or P
  MISC_FEATURE (15)..(15): X is K, R or H for basic amino acids
XXXXXXXXXXXXXXX

SEQ ID NO: 613 - protein, 14 aa, Artificial
  Completely synthesized peptide construct
  MISC_FEATURE (1)..(1): X is D and E for acidic amino acids
  MISC_FEATURE (2)..(2): X is N or Q for amidated amino acids
  MISC_FEATURE (3)..(3): X is F or P
  MISC_FEATURE (4)..(4): X is GabaX for X2X3 or X3X2 or X2X3 or X3X2 or X3X3 or X2X2
  MISC_FEATURE (5)..(5): X is K, R or H for basic amino acids
  MISC_FEATURE (6)..(6): X is F, W or Y for aromatic amino acids
  MISC_FEATURE (7)..(7): X is F, W or Y for aromatic amino acids
  MISC_FEATURE (8)..(8): X is K, R or H for basic amino acids
  MISC_FEATURE (9)..(9): X is N or Q for amidated amino acids
  MISC_FEATURE (10)..(10): X is I, L or V
  MISC_FEATURE (11)..(11): X is I, L or V
  MISC_FEATURE (12)..(12): X is T or S
  MISC_FEATURE (13)..(13): X is F or P
  MISC_FEATURE (14)..(14): X is K, R or H for basic amino acids
XXXXXXXXXXXXXX

SEQ ID NO: 614 - protein, 14 aa, Artificial
  Completely synthesized peptide construct
  MISC_FEATURE (1)..(1): X is D and E for acidic amino acids
  MISC_FEATURE (2)..(2): X is N or Q for amidated amino acids
  MISC_FEATURE (3)..(3): X is F or P
  MISC_FEATURE (4)..(4): X is I, L or V
  MISC_FEATURE (5)..(5): X is I, L or V
  MISC_FEATURE (6)..(6): X is K, R or H for basic amino acids
  MISC_FEATURE (7)..(7): X is K, R or H for basic amino acids
  MISC_FEATURE (8)..(8): X is K, R or H for basic amino acids
  MISC_FEATURE (9)..(9): X is N or Q for amidated amino acids
  MISC_FEATURE (9)..(9): X is K, R or H for basic amino acids
  MISC_FEATURE (10)..(10): X is N or Q for amidated amino acids
  MISC_FEATURE (11)..(11): X is GabaX for X2X3 or X3X2 or X2X3 or X3X2 or X3X3 or X2X2
  MISC_FEATURE (12)..(12): X is T or S
  MISC_FEATURE (13)..(13): X is F or P
  MISC_FEATURE (14)..(14): X is K, R or H for basic amino acids
XXXXXXXXXXXXXX

SEQ ID NO: 615 - protein, 13 aa, Artificial
  Completely synthesized peptide construct
  MISC_FEATURE (1)..(1): X is D and E for acidic amino acids
  MISC_FEATURE (2)..(2): X is N or Q for amidated amino acids
  MISC_FEATURE (3)..(3): X is F or P
  MISC_FEATURE (4)..(4): X is GabaX for X2X3 or X3X2 or X2X3 or X3X2 or X3X3 or X2X2
  MISC_FEATURE (5)..(5): X is K, R or H for basic amino acids
  MISC_FEATURE (6)..(6): X is F, W or Y for aromatic amino acids
  MISC_FEATURE (7)..(7): X is F, W or Y for aromatic amino acids
  MISC_FEATURE (8)..(8): X is K, R or H for basic amino acids
  MISC_FEATURE (9)..(9): X is N or Q for amidated amino acids
  MISC_FEATURE (10)..(10): X is GabaX for X2X3 or X3X2 or X2X3 or X3X2 or X3X3 or X2X2
  MISC_FEATURE (11)..(11): X is T or S
  MISC_FEATURE (12)..(12): X is F or P
  MISC_FEATURE (13)..(13): X is K, R or H for basic amino acids
XXXXXXXXXXXXX

SEQ ID NO: 616 - protein, 16 aa, Artificial
  Completely synthesized peptide construct
  MISC_FEATURE (1)..(1): X is acetyl or propionyl group, D glycine or D alanine, cyclohexylalanine at amino terminus
  MISC_FEATURE (2)..(2): X is D and E for acidic amino acids
  MISC_FEATURE (3)..(3): X is N or Q for amidated amino acids
  MISC_FEATURE (4)..(4): X is F or P
  MISC_FEATURE (5)..(5): X is I, L or V
  MISC_FEATURE (6)..(6): X is I, L or V
  MISC_FEATURE (7)..(7): X is K, R or H for basic amino acids
  MISC_FEATURE (8)..(8): X is F, W or Y for aromatic amino acids
  MISC_FEATURE (9)..(9): X is F, W or Y for aromatic amino acids
  MISC_FEATURE (10)..(10): X is K, R or H for basic amino acids
  MISC_FEATURE (11)..(11): X is N or Q for amidated amino acids
  MISC_FEATURE (12)..(12): X is I, L or V
  MISC_FEATURE (13)..(13): X is I, L or V
  MISC_FEATURE (14)..(14): X is T or S
  MISC_FEATURE (15)..(15): X is F or P
  MISC_FEATURE (16)..(16): X is K, R or H for basic amino acids
XXXXXXXXXXXXXXXX

SEQ ID NO: 617 - protein, 15 aa, Artificial
  Completely synthesized peptide construct
  MISC_FEATURE (1)..(1): X is acetyl or propionyl group, D glycine or D alanine, cyclohexylalanine at amino terminus
  MISC_FEATURE (2)..(2): X is D and E for acidic amino acids
  MISC_FEATURE (3)..(3): X is N or Q for amidated amino acids
  MISC_FEATURE (4)..(4): X is F or P
  MISC_FEATURE (5)..(5): X is GabaX for X2X3 or X3X2 or X2X3 or X3X2 or X3X3 or X2X2
  MISC_FEATURE (6)..(6): X is K, R or H for basic amino acids
  MISC_FEATURE (7)..(7): X is F, W or Y for aromatic amino acids
  MISC_FEATURE (8)..(8): X is F, W or Y for aromatic amino acids
  MISC_FEATURE (9)..(9): X is K, R or H for basic amino acids
  MISC_FEATURE (10)..(10): X is N or Q for amidated amino acids
  MISC_FEATURE (11)..(11): X is I, L or V
  MISC_FEATURE (12)..(12): X is I, L or V
  MISC_FEATURE (13)..(13): X is T or S
  MISC_FEATURE (14)..(14): X is F or P
  MISC_FEATURE (15)..(15): X is K, R or H for basic amino acids
XXXXXXXXXXXXXXX

SEQ ID NO: 618 - protein, 15 aa, Artificial
  Completely synthesized peptide construct
  MISC_FEATURE (1)..(1): X is acetyl or propionyl group, D glycine or D alanine, cyclohexylalanine at amino terminus
  MISC_FEATURE (2)..(2): X is D and E for acidic amino acids
  MISC_FEATURE (3)..(3): X is N or Q for amidated amino acids
  MISC_FEATURE (4)..(4): X is F or P
  MISC_FEATURE (5)..(5): X is I, L or V
  MISC_FEATURE (6)..(6): X is I, L or V
  MISC_FEATURE (7)..(7): X is K, R or H for basic amino acids
  MISC_FEATURE (8)..(8): X is F, W or Y for aromatic amino acids
  MISC_FEATURE (9)..(9): X is F, W or Y for aromatic amino acids
  MISC_FEATURE (10)..(10): X is K, R or H for basic amino acids
  MISC_FEATURE (11)..(11): X is N or Q for amidated amino acids
  MISC_FEATURE (12)..(12): X is GabaX for X2X3 or X3X2 or X2X3 or X3X2 or X3X3 or X2X2
  MISC_FEATURE (13)..(13): X is T or S
  MISC_FEATURE (14)..(14): X is F or P
  MISC_FEATURE (15)..(15): X is K, R or H for basic amino acids
XXXXXXXXXXXXXXX

SEQ ID NO: 619 - protein, 14 aa, Artificial
  Completely synthesized peptide construct
  MISC_FEATURE (1)..(1): X is acetyl or propionyl group, D glycine or D alanine, cyclohexylalanine at amino terminus
  MISC_FEATURE (2)..(2): X is D and E for acidic amino acids
  MISC_FEATURE (3)..(3): X is N or Q for amidated amino acids
  MISC_FEATURE (4)..(4): X is F or P
  MISC_FEATURE (5)..(5): X is GabaX for X2X3 or X3X2 or X2X3 or X3X2 or X3X3 or X2X2
  MISC_FEATURE (6)..(6): X is K, R or H for basic amino acids
  MISC_FEATURE (7)..(7): X is F, W or Y for aromatic amino acids
  MISC_FEATURE (8)..(8): X is F, W or Y for aromatic amino acids
  MISC_FEATURE (9)..(9): X is K, R or H for basic amino acids
  MISC_FEATURE (10)..(10): X is N or Q for amidated amino acids
  MISC_FEATURE (11)..(11): X is GabaX for X2X3 or X3X2 or X2X3 or X3X2 or X3X3 or X2X2
  MISC_FEATURE (12)..(12): X is T or S
  MISC_FEATURE (13)..(13): X is F or P
  MISC_FEATURE (14)..(14): X is K, R or H for basic amino acids
XXXXXXXXXXXXXX

SEQ ID NO: 620 - protein, 16 aa, Artificial
  Completely synthesized peptide construct
QSIAFPSKTSASIGSL

SEQ ID NO: 621 - protein, 16 aa, Artificial
  Completely synthesized peptide construct
  MISC_FEATURE (1)..(1): X is N or Q for amidated amino acids
  MISC_FEATURE (2)..(2): X is T or S
  MISC_FEATURE (3)..(3): X is I, L or V
  MISC_FEATURE (4)..(4): X is A and G
  MISC_FEATURE (5)..(5): X is GabaX for X2X3 or X3X2 or X2X3 or X3X2 or X3X3 or X2X2
  MISC_FEATURE (6)..(6): X is F or P
  MISC_FEATURE (7)..(7): X is T or S
  MISC_FEATURE (8)..(8): X is K, R or H for basic amino acids
  MISC_FEATURE (9)..(9): X is T or S
  MISC_FEATURE (10)..(10): X is T or S
  MISC_FEATURE (11)..(11): X is A and G
  MISC_FEATURE (12)..(12): X is T or S
  MISC_FEATURE (13)..(13): X is I, L or V
  MISC_FEATURE (14)..(14): X is A and G
  MISC_FEATURE (15)..(15): X is T or S
  MISC_FEATURE (16)..(16): X is I, L or V
XXXXXXXXXXXXXXXX

SEQ ID NO: 622 - protein, 17 aa, Artificial
  Completely synthesized peptide construct
  MISC_FEATURE (1)..(1): X is acetyl or propionyl group, D glycine or D alanine, cyclohexylalanine at amino terminus
  MISC_FEATURE (2)..(2): X is N or Q for amidated amino acids
  MISC_FEATURE (3)..(3): X is T or S
  MISC_FEATURE (4)..(4): X is I, L or V
  MISC_FEATURE (5)..(5): X is A and G
  MISC_FEATURE (6)..(6): X is F or P
  MISC_FEATURE (7)..(7): X is F or P
  MISC_FEATURE (8)..(8): X is T or S
  MISC_FEATURE (9)..(9): X is K, R or H for basic amino acids
  MISC_FEATURE (10)..(10): X is T or S
  MISC_FEATURE (11)..(11): X is T or S
  MISC_FEATURE (12)..(12): X is A and G
  MISC_FEATURE (13)..(13): X is T or S
  MISC_FEATURE (14)..(14): X is I, L or V
  MISC_FEATURE (15)..(15): X is A and G
  MISC_FEATURE (16)..(16): X is T or S
  MISC_FEATURE (17)..(17): X is I, L or V
XXXXXXXXXXXXXXXXX

SEQ ID NO: 623 - protein, 20 aa, Artificial
  Completely synthesized peptide construct
SKTSASIGSLCADARMYGVL

SEQ ID NO: 624 - protein, 19 aa, Artificial
  Completely synthesized peptide construct
  MISC_FEATURE (1)..(1): X is T or S
  MISC_FEATURE (2)..(2): X is K, R or H for basic amino acids
  MISC_FEATURE (3)..(3): X is T or S
  MISC_FEATURE (4)..(4): X is T or S
  MISC_FEATURE (5)..(5): X is A and G
  MISC_FEATURE (6)..(6): X is T or S
  MISC_FEATURE (7)..(7): X is I, L or V
  MISC_FEATURE (8)..(8): X is A and G
  MISC_FEATURE (9)..(9): X is T or S
  MISC_FEATURE (10)..(10): X is I, L or V
  MISC_FEATURE (11)..(11): X is C or S
  MISC_FEATURE (12)..(12): X is A and G
  MISC_FEATURE (13)..(13): X is D and E for acidic amino acids
  MISC_FEATURE (14)..(14): X is A and G
  MISC_FEATURE (15)..(15): X is K, R or H for basic amino acids
  MISC_FEATURE (16)..(16): X is M or Nle (Norleucine)
  MISC_FEATURE (17)..(17): X is F, W or Y for aromatic amino acids
  MISC_FEATURE (18)..(18): X is A and G
  MISC_FEATURE (19)..(19): X is I, L or V
XXXXXXXXXXXXXXXXXXX

SEQ ID NO: 625 - protein, 20 aa, Artificial
  Completely synthesized peptide construct
  MISC_FEATURE (1)..(1): X is acetyl or propionyl group, D glycine or D alanine, cyclohexylalanine at amino terminus
  MISC_FEATURE (2)..(2): X is T or S
  MISC_FEATURE (3)..(3): X is K, R or H for basic amino acids
  MISC_FEATURE (4)..(4): X is T or S
  MISC_FEATURE (5)..(5): X is T or S
  MISC_FEATURE (6)..(6): X is A and G
  MISC_FEATURE (7)..(7): X is T or S
  MISC_FEATURE (8)..(8): X is I, L or V
  MISC_FEATURE (9)..(9): X is A and G
  MISC_FEATURE (10)..(10): X is T or S
  MISC_FEATURE (11)..(11): X is I, L or V
  MISC_FEATURE (12)..(12): X is C or S
  MISC_FEATURE (13)..(13): X is A and G
  MISC_FEATURE (14)..(14): X is D and E for acidic amino acids
  MISC_FEATURE (15)..(15): X is A and G
  MISC_FEATURE (16)..(16): X is K, R or H for basic amino acids
  MISC_FEATURE (17)..(17): X is M or Nle (Norleucine)
  MISC_FEATURE (18)..(18): X is F, W or Y for aromatic amino acids
  MISC_FEATURE (19)..(19): X is A and G
  MISC_FEATURE (20)..(20): X is I, L or V
XXXXXXXXXXXXXXXXXXXX

SEQ ID NO: 626 - protein, 9 aa, Artificial
  Completely synthesized peptide construct
FFRDHSYQE

SEQ ID NO: 627 - protein, 9 aa, Artificial
  Completely synthesized peptide construct
  MISC_FEATURE (1)..(1): X is F or P
  MISC_FEATURE (2)..(2): X is F or P
  MISC_FEATURE (3)..(3): X is K, R or H for basic amino acids
  MISC_FEATURE (4)..(4): X is D and E for acidic amino acids
  MISC_FEATURE (5)..(5): X is K, R or H for basic amino acids
  MISC_FEATURE (6)..(6): X is T or S
  MISC_FEATURE (7)..(7): X is F, W or Y for aromatic amino acids
  MISC_FEATURE (8)..(8): X is N or Q for amidated amino acids
  MISC_FEATURE (9)..(9): X is D and E for acidic amino acids
XXXXXXXXX

SEQ ID NO: 628 - protein, 10 aa, Artificial
  Completely synthesized peptide construct
  MISC_FEATURE (1)..(1): X is acetyl or propionyl group, D glycine or D alanine, cyclohexylalanine at amino terminus
  MISC_FEATURE (2)..(2): X is F or P
  MISC_FEATURE (3)..(3): X is F or P
  MISC_FEATURE (4)..(4): X is K, R or H for basic amino acids
  MISC_FEATURE (5)..(5): X is D and E for acidic amino acids
  MISC_FEATURE (6)..(6): X is K, R or H for basjc amino acids
  MISC_FEATURE (7)..(7): X is T or S
  MISC_FEATURE (8)..(8): X is F, W or Y for aromatic amino acids
  MISC_FEATURE (9)..(9): X is N or Q for amidated amino acids
  MISC_FEATURE (10)..(10): X is D and E for acidic amino acids
XXXXXXXXXX

SEQ ID NO: 629 - protein, 15 aa, Artificial
  Completely synthesized peptide construct
ENPVVHFFKNIVTPR

SEQ ID NO: 630 - protein, 14 aa, Artificial
  Completely synthesized peptide construct
  MISC_FEATURE (1)..(1): X is D and E for acidic amino acids
  MISC_FEATURE (2)..(2): X is N or Q for amidated amino acids
  MISC_FEATURE (3)..(3): X is F or P
  MISC_FEATURE (4)..(4): X is I, L or V
  MISC_FEATURE (5)..(5): X is I, L or V
  MISC_FEATURE (6)..(6): X is K, R or H for basic amino acids
  MISC_FEATURE (7)..(7): X is F or P
  MISC_FEATURE (8)..(8): X is F or P
  MISC_FEATURE (9)..(9): X is K, R or H for basic amino acids
  MISC_FEATURE (10)..(10): X is N or Q for amidated amino acids
  MISC_FEATURE (11)..(11): X is I, L or V
  MISC_FEATURE (12)..(12): X is I, L or V
  MISC_FEATURE (13)..(13): X is T or S
  MISC_FEATURE (14)..(14): X is F or P
XXXXXXXXXXXXXX

SEQ ID NO: 631 - protein, 13 aa, Artificial
  Completely synthesized peptide construct
  MISC_FEATURE (1)..(1): X is D and E for acidic amino acids
  MISC_FEATURE (2)..(2): X is N or Q for amidated amino acids
  MISC_FEATURE (3)..(3): X is F or P
  MISC_FEATURE (4)..(4): X is GabaX for X2X3 or X3X2 or X2X3 or X3X2 or X3X3 or X2X2
  MISC_FEATURE (5)..(5): X is K, R or H for basic amino acids
  MISC_FEATURE (6)..(6): X is F or P
  MISC_FEATURE (7)..(7): X is F or P
  MISC_FEATURE (8)..(8): X is K, R or H for basic amino acids
  MISC_FEATURE (9)..(9): X is N or Q for amidated amino acids
  MISC_FEATURE (10)..(10): X is I, L or V
  MISC_FEATURE (11)..(11): X is I, L or V
  MISC_FEATURE (12)..(12): X is T or S
  MISC_FEATURE (13)..(13): X is F or P
XXXXXXXXXXXXX

SEQ ID NO: 632 - protein, 13 aa, Artificial
  Completely synthesized peptide construct
  MISC_FEATURE (1)..(1): X is D and E for acidic amino acids
  MISC_FEATURE (2)..(2): X is N or Q for amidated amino acids
  MISC_FEATURE (3)..(3): X is F or P
  MISC_FEATURE (4)..(4): X is I, L or V
  MISC_FEATURE (5)..(5): X is I, L or V
  MISC_FEATURE (6)..(6): X is K, R or H for basic amino acids
  MISC_FEATURE (7)..(7): X is F or P
  MISC_FEATURE (8)..(8): X is F or P
  MISC_FEATURE (9)..(9): X is K, R or H for basic amino acids
  MISC_FEATURE (10)..(10): X is N or Q for amidated amino acids
  MISC_FEATURE (11)..(11): X is GabaX for X2X3 or X3X2 or X2X3 or X3X2 or X3X3 or X2X2
  MISC_FEATURE (12)..(12): X is T or S
  MISC_FEATURE (13)..(13): X is F or P
XXXXXXXXXXXXX

SEQ ID NO: 633 - protein, 12 aa, Artificial
  Completely synthesized peptide construct
  MISC_FEATURE (1)..(1): X is D and E for acidic amino acids
  MISC_FEATURE (2)..(2): X is N or Q for amidated amino acids
  MISC_FEATURE (3)..(3): X is F or P
  MISC_FEATURE (4)..(4): X is GabaX for X2X3 or X3X2 or X2X3 or X3X2 or X3X3 or X2X2
  MISC_FEATURE (5)..(5): X is K, R or H for basic amino acids
  MISC_FEATURE (6)..(6): X is F or P
  MISC_FEATURE (7)..(7): X is F or P
  MISC_FEATURE (8)..(8): X is K, R or H for basic amino acids
  MISC_FEATURE (9)..(9): X is N or Q for amidated amino acids
  MISC_FEATURE (10)..(10): X is GabaX for X2X3 or X3X2 or X2X3 or X3X2 or X3X3 or X2X2
  MISC_FEATURE (11)..(11): X is T or S
  MISC_FEATURE (12)..(12): X is F or P
XXXXXXXXXXXX

SEQ ID NO: 634 - protein, 15 aa, Artificial
  Completely synthesized peptide construct
  MISC_FEATURE (1)..(1): X is acetyl or propionyl group, D glycine or D alanine, cyclohexylalanine at amino terminus
  MISC_FEATURE (2)..(2): X is D and E for acidic amino acids
  MISC_FEATURE (3)..(3): X is N or Q for amidated amino acids
  MISC_FEATURE (4)..(4): X is F or P
  MISC_FEATURE (5)..(5): X is I, L or V
  MISC_FEATURE (6)..(6): X is I, L or V
  MISC_FEATURE (7)..(7): X is K, R or H for basic amino acids
  MISC_FEATURE (8)..(8): X is F or P
  MISC_FEATURE (9)..(9): X is F or P
  MISC_FEATURE (10)..(10): X is K, R or H for basic amino acids
  MISC_FEATURE (11)..(11): X is N or Q for amidated amino acids
  MISC_FEATURE (12)..(12): X is I, L or V
  MISC_FEATURE (13)..(13): X is I, L or V
  MISC_FEATURE (14)..(14): X is T or S
  MISC_FEATURE (15)..(15): X is F or P
XXXXXXXXXXXXXXX

SEQ ID NO: 635 - protein, 14 aa, Artificial
  Completely synthesized peptide construct
  MISC_FEATURE (1)..(1): X is acetyl or propionyl group, D glycine or D alanine, cyclohexylalanine at amino terminus
  MISC_FEATURE (2)..(2): X is D and E for acidic amino acids
  MISC_FEATURE (3)..(3): X is N or Q for amidated amino acids
  MISC_FEATURE (4)..(4): X is F or P
  MISC_FEATURE (5)..(5): X is GabaX for X2X3 or X3X2 or X2X3 or X3X2 or X3X3 or X2X2
  MISC_FEATURE (6)..(6): X is K, R or H for basic amino acids
  MISC_FEATURE (7)..(7): X is F or P
  MISC_FEATURE (8)..(8): X is F or P
  MISC_FEATURE (9)..(9): X is K, R or H for basic amino acids
  MISC_FEATURE (10)..(10): X is N or Q for amidated amino acids
  MISC_FEATURE (11)..(11): X is I, L or V
  MISC_FEATURE (12)..(12): X is I, L or V
  MISC_FEATURE (13)..(13): X is T or S
  MISC_FEATURE (14)..(14): X is F or P
XXXXXXXXXXXXXX

SEQ ID NO: 636 - protein, 14 aa, Artificial
  Completely synthesized peptide construct
  MISC_FEATURE (1)..(1): X is acetyl or propionyl group, D glycine or D alanine, cyclohexylalanine at amino terminus
  MISC_FEATURE (2)..(2): X is D and E for acidic amino acids
  MISC_FEATURE (3)..(3): X is N or Q for amidated amino acids
  MISC_FEATURE (4)..(4): X is F or P
  MISC_FEATURE (5)..(5): X is I, L or V
  MISC_FEATURE (6)..(6): X is I, L or V
  MISC_FEATURE (7)..(7): X is K, R or H for basic amino acids
  MISC_FEATURE (8)..(8): X is F or P
  MISC_FEATURE (9)..(9): X is F or P
  MISC_FEATURE (10)..(10): X is K, R or H for basic amino acids
  MISC_FEATURE (11)..(11): X is N or Q for amidated amino acids
  MISC_FEATURE (12)..(12): X is GabaX for X2X3 or X3X2 or X2X3 or X3X2 or X3X3 or X2X2
  MISC_FEATURE (13)..(13): X is T or S
  MISC_FEATURE (14)..(14): X is F or P
XXXXXXXXXXXXXX

SEQ ID NO: 637 - protein, 13 aa, Artificial
  Completely synthesized peptide construct
  MISC_FEATURE (1)..(1): X is acetyl or propionyl group, D glycine or D alanine, cyclohexylalanine at amino terminus
  MISC_FEATURE (2)..(2): X is D and E for acidic amino acids
  MISC_FEATURE (3)..(3): X is N or Q for amidated amino acids
  MISC_FEATURE (4)..(4): X is F or P
  MISC_FEATURE (5)..(5): X is GabaX for X2X3 or X3X2 or X2X3 or X3X2 or X3X3 or X2X2
  MISC_FEATURE (6)..(6): X is K, R or H for basic amino acids
  MISC_FEATURE (7)..(7): X is F or P
  MISC_FEATURE (8)..(8): X is F or P
  MISC_FEATURE (9)..(9): X is K, R or H for basic amino acids
  MISC_FEATURE (10)..(10): X is N or Q for amidated amino acids
  MISC_FEATURE (11)..(11): X is GabaX for X2X3 or X3X2 or X2X3 or X3X2 or X3X3 or X2X2
  MISC_FEATURE (12)..(12): X is T or S
  MISC_FEATURE (13)..(13): X is F or P
XXXXXXXXXXXXX

SEQ ID NO: 638 - protein, 21 aa, Artificial
  Completely synthesized peptide construct
TGTEKLIETYFSKNYQDYEYL

SEQ ID NO: 639 - protein, 21 aa, Artificial
  Completely synthesized peptide construct
  MISC_FEATURE (1)..(1): X is T or S
  MISC_FEATURE (2)..(2): X is A and G
  MISC_FEATURE (3)..(3): X is T or S
  MISC_FEATURE (4)..(4): X is D and E for acidic amino acids
  MISC_FEATURE (5)..(5): X is K, R or H for basic amino acids
  MISC_FEATURE (6)..(6): X is I, L or V
  MISC_FEATURE (7)..(7): X is I, L or V
  MISC_FEATURE (8)..(8): X is D and E for acidic amino acids
  MISC_FEATURE (9)..(9): X is T or S
  MISC_FEATURE (10)..(10): X is F, W or Y for aromatic amino acids
  MISC_FEATURE (11)..(11): X is F, W or Y for aromatic amino acids
  MISC_FEATURE (12)..(12): X is T or S
  MISC_FEATURE (13)..(13): X is K, R or H for basic amino acids
  MISC_FEATURE (14)..(14): X is N or Q for amidated amino acids
  MISC_FEATURE (15)..(15): X is F, W or Y for aromatic amino acids
  MISC_FEATURE (16)..(16): X is N or Q for amidated amino acids
  MISC_FEATURE (17)..(17): X is D and E for acidic amino acids
  MISC_FEATURE (18)..(18): X is F, W or Y for aromatic amino acids
  MISC_FEATURE (19)..(19): X is D and E for acidic amino acids
  MISC_FEATURE (20)..(20): X is F, W or Y for aromatic amino acids
  MISC_FEATURE (21)..(21): X is I, L or V
XXXXXXXXXXXXXXXXXXXXX

SEQ ID NO: 640 - protein, 21 aa, Artificial
  Completely synthesized peptide construct
  MISC_FEATURE (1)..(1): X is T or S
  MISC_FEATURE (2)..(2): X is A and G
  MISC_FEATURE (3)..(3): X is T or S
  MISC_FEATURE (4)..(4): X is D and E for acidic amino acids
  MISC_FEATURE (5)..(5): X is K, R or H for basic amino acids
  MISC_FEATURE (6)..(6): X is I, L or V
  MISC_FEATURE (7)..(7): X is I, L or V
  MISC_FEATURE (8)..(8): X is D and E for acidic amino acids
  MISC_FEATURE (9)..(9): X is T or S
  MISC_FEATURE (10)..(10): X is F, W or Y for aromatic amino acids
  MISC_FEATURE (11)..(11): X is F, W or Y for aromatic amino acids
  MISC_FEATURE (12)..(12): X is T or S
  MISC_FEATURE (13)..(13): X is K, R or H for basic amino acids
  MISC_FEATURE (14)..(14): X is N or Q for amidated amino acids
  MISC_FEATURE (15)..(15): X is F, W or Y for aromatic amino acids
  MISC_FEATURE (16)..(16): X is N or Q for amidated amino acids
  MISC_FEATURE (17)..(17): X is D and E for acidic amino acids
  MISC_FEATURE (18)..(18): X is F, W or Y for aromatic amino acids
  MISC_FEATURE (19)..(19): X is D and E for acidic amino acids
  MISC_FEATURE (20)..(20): X is F, W or Y for aromatic amino acids
  MISC_FEATURE (21)..(21): X is I, L or V
XXXXXXXXXXXXXXXXXXXXX

SEQ ID NO: 641 - protein, 20 aa, Artificial
  Completely synthesized peptide construct
  MISC_FEATURE (1)..(1): X is T or S
  MISC_FEATURE (2)..(2): X is A and G
  MISC_FEATURE (3)..(3): X is T or S
  MISC_FEATURE (4)..(4): X is D and E for acidic amino acids
  MISC_FEATURE (5)..(5): X is K, R or H for basic amino acids
  MISC_FEATURE (6)..(6): X is GabaX  for X2X3 or X3X2 or X2X3 or X3X2 or X3X3 or X2X2
  MISC_FEATURE (7)..(7): X is D and E for acidic amino acids
  MISC_FEATURE (8)..(8): X is T or S
  MISC_FEATURE (9)..(9): X is F, W or Y for aromatic amino acids
  MISC_FEATURE (10)..(10): X is F, W or Y for aromatic amino acids
  MISC_FEATURE (11)..(11): X is T or S
  MISC_FEATURE (12)..(12): X is K, R or H for basic amino acids
  MISC_FEATURE (13)..(13): X is N or Q for amidated amino acids
  MISC_FEATURE (14)..(14): X is F, W or Y for aromatic amino acids
  misc_feature (15)..(15): Xaa can be any naturally occurring amino acid
  MISC_FEATURE (16)..(16): X is D and E for acidic amino acids
  MISC_FEATURE (17)..(17): X is F, W or Y or aromatic amino acids
  MISC_FEATURE (18)..(18): X is D and E for acidic amino acids
  MISC_FEATURE (19)..(19): X is F, W or Y for aromatic amino acids
  MISC_FEATURE (20)..(20): X is I, L or V
XXXXXXXXXXXXXXXXXXXX

SEQ ID NO: 642 - protein, 20 aa, Artificial
  Completely synthesized peptide construct
  MISC_FEATURE (1)..(1): X is T or S
  MISC_FEATURE (2)..(2): X is A and G
  MISC_FEATURE (3)..(3): X is T or S
  MISC_FEATURE (4)..(4): X is D and E for acidic amino acids
  MISC_FEATURE (5)..(5): X is K, R or H for basic amino acids
  MISC_FEATURE (6)..(6): X is I, L or V
  MISC_FEATURE (7)..(7): X is GabaX for X2X3 or X3X2 or X2X3 or X3X2 or X3X3 or X2X2
  MISC_FEATURE (8)..(8): X is T or S
  MISC_FEATURE (9)..(9): X is F, W or Y for aromatic amino acids
  MISC_FEATURE (10)..(10): X is F, W or Y for aromatic amino acids
  MISC_FEATURE (11)..(11): X is T or S
  MISC_FEATURE (12)..(12): X is K, R or H for basic amino acids
  MISC_FEATURE (13)..(13): X is N or Q for amidated amino acids
  MISC_FEATURE (14)..(14): X is F, W or Y for aromatic amino acids
  MISC_FEATURE (15)..(15): X is T or S
  MISC_FEATURE (16)..(16): X is D and E for acidic amino acids
  MISC_FEATURE (17)..(17): X is F, W or Y for aromatic amino acids
  MISC_FEATURE (18)..(18): X is D and E for acidic amino acids
  MISC_FEATURE (19)..(19): X is F, W or Y for aromatic amino acids
  MISC_FEATURE (20)..(20): X is I, L or V
XXXXXXXXXXXXXXXXXXXX

SEQ ID NO: 643 - protein, 19 aa, Artificial
  Completely synthesized peptide construct
  MISC_FEATURE (1)..(1): X is T or S
  MISC_FEATURE (2)..(2): X is A and G
  MISC_FEATURE (3)..(3): X is T or S
  MISC_FEATURE (4)..(4): X is D and E for acidic amino acids
  MISC_FEATURE (5)..(5): X is K, R or H for basic amino acids
  MISC_FEATURE (6)..(6): X is 5-aminopentanoic acid for replacement of 3 or 4 amino acids of X2 and X3
  MISC_FEATURE (7)..(7): X is T or S
  MISC_FEATURE (8)..(8): X is F, W or Y for aromatic amino acids
  MISC_FEATURE (9)..(9): X is F, W or Y for aromatic amino acids
  MISC_FEATURE (10)..(10): X is T or S
  MISC_FEATURE (11)..(11): X is K, R or H for basic amino acids
  MISC_FEATURE (12)..(12): X is N or Q for amidated amino acids
  MISC_FEATURE (13)..(13): X is F, W or Y for aromatic amino acids
  MISC_FEATURE (14)..(14): X is N or Q for amidated amino acids
  MISC_FEATURE (15)..(15): X is D and E for acidic amino acids
  MISC_FEATURE (16)..(16): X is F, W or Y for aromatic amino acids
  MISC_FEATURE (17)..(17): X is D and E for acidic amino acids
  MISC_FEATURE (18)..(18): X is F, W or Y for aromatic amino acids
  MISC_FEATURE (19)..(19): X is I, L or V
XXXXXXXXXXXXXXXXXXX

SEQ ID NO: 644 - protein, 22 aa, Artificial
  Completely synthesized peptide construct
  MISC_FEATURE (1)..(1): X is acetyl or propionyl group, D glycine or D alanine, cyclohexylalanine at amino terminus
  MISC_FEATURE (2)..(2): X is T or S
  MISC_FEATURE (3)..(3): X is A and G
  MISC_FEATURE (4)..(4): X is T or S
  MISC_FEATURE (5)..(5): X is D and E for acidic amino acids
  MISC_FEATURE (6)..(6): X is K, R or H for basic amino acids
  MISC_FEATURE (7)..(7): X is I, L or V
  MISC_FEATURE (8)..(8): X is I, L or V
  MISC_FEATURE (9)..(9): X is D and E for acidic amino acids
  MISC_FEATURE (10)..(10): X is T or S
  MISC_FEATURE (11)..(11): X is F, W or Y for aromatic amino acids
  MISC_FEATURE (12)..(12): X is F, W or Y for aromatic amino acids
  MISC_FEATURE (13)..(13): X is T or S
  MISC_FEATURE (14)..(14): X is K, R or H for basic amino acids
  MISC_FEATURE (15)..(15): X is N or Q for amidated amino acids
  MISC_FEATURE (16)..(16): X is F, W or Y for aromatic amino acids
  MISC_FEATURE (17)..(17): X is N or Q for amidated amino acids
  MISC_FEATURE (18)..(18): X is D and E for acidic amino acids
  MISC_FEATURE (19)..(19): X is F, W or Y for aromatic amino acids
  MISC_FEATURE (20)..(20): X is D and E for acidic amino acids
  MISC_FEATURE (21)..(21): X is F, W or Y for aromatic amino acids
  MISC_FEATURE (22)..(22): X is I, L or V
XXXXXXXXXXXXXXXXXXXXXX

SEQ ID NO: 645 - protein, 22 aa, Artificial
  Completely synthesized peptide construct
  MISC_FEATURE (1)..(1): X is acetly or propionyl group, D glycine or D alanine, cyclohexylalanine at amino terminus
  MISC_FEATURE (2)..(2): X is T or S
  MISC_FEATURE (3)..(3): X is A and G
  MISC_FEATURE (4)..(4): X is T or S
  MISC_FEATURE (5)..(5): X is D and E for acidic amino acids
  MISC_FEATURE (6)..(6): X is K, R or H for basic amino acids
  MISC_FEATURE (7)..(7): X is I, L or V
  MISC_FEATURE (8)..(8): X is I, L or V
  MISC_FEATURE (9)..(9): X is D and E for acidic amino acids
  MISC_FEATURE (10)..(10): X is T or S
  MISC_FEATURE (11)..(11): X is F, W or Y for aromatic amino acids
  MISC_FEATURE (12)..(12): X is F, W or Y for aromatic amino acids
  MISC_FEATURE (13)..(13): X is T or S
  MISC_FEATURE (14)..(14): X is K, R or H for basic amino acids
  MISC_FEATURE (15)..(15): X is N or Q for amidated amino acids
  MISC_FEATURE (16)..(16): X is F, W or Y for aromatic amino acids
  MISC_FEATURE (17)..(17): X is N or Q for amidated amino acids
  MISC_FEATURE (18)..(18): X is D and E for acidic amino acids
  MISC_FEATURE (19)..(19): X is F, W or Y for aromatic amino acids
  MISC_FEATURE (20)..(20): X is D and E for acidic amino acids
  MISC_FEATURE (21)..(21): X is F, W or Y for aromatic amino acids
  MISC_FEATURE (22)..(22): X is I, L or V
XXXXXXXXXXXXXXXXXXXXXX

SEQ ID NO: 646 - protein, 21 aa, Artificial
  Completely synthesized peptide construct
  MISC_FEATURE (1)..(1): X is acetyl or propionyl group, D glycine or D alanine, cyclohexylalanine at amino terminus
  MISC_FEATURE (2)..(2): X is T or S
  MISC_FEATURE (3)..(3): X is A and G
  MISC_FEATURE (4)..(4): X is T or S
  MISC_FEATURE (5)..(5): X is D and E for acidic amino acids
  MISC_FEATURE (6)..(6): X is K, R or H for basic amino acids
  MISC_FEATURE (7)..(7): X is GabaX2 for X2X3 or X3X2 or X2X3 or X3X2 or X3X3 or X2X2
  MISC_FEATURE (8)..(8): X is D and E for acidic amino acids
  MISC_FEATURE (9)..(9): X is T or S
  MISC_FEATURE (10)..(10): X is F, W or Y for aromatic amino acids
  MISC_FEATURE (11)..(11): X is F, W or Y for aromatic amino acids
  MISC_FEATURE (12)..(12): X is T or S
  MISC_FEATURE (13)..(13): X is K, R or H for basic amino acids
  MISC_FEATURE (14)..(14): X is N or Q for amidated amino acids
  MISC_FEATURE (15)..(15): X is F, W or Y for aromatic amino acids
  MISC_FEATURE (16)..(16): X is N or Q for amidated amino acids
  MISC_FEATURE (17)..(17): X is D and E for acidic amino acids
  MISC_FEATURE (18)..(18): X is F, W or Y for aromatic amino acids
  MISC_FEATURE (19)..(19): X is D and E for aciidic amino acids
  MISC_FEATURE (20)..(20): X is F, W or Y for aromatic amino acids
  MISC_FEATURE (21)..(21): X is I, L or V
XXXXXXXXXXXXXXXXXXXXX

SEQ ID NO: 647 - protein, 21 aa, Artificial
  Completely synthesized peptide construct
  MISC_FEATURE (1)..(1): X is acetyl or propionyl group, D glycine or D alanine, cyclohexylalanine at amino terminus
  MISC_FEATURE (2)..(2): X is T or S
  MISC_FEATURE (3)..(3): X is A and G
  MISC_FEATURE (4)..(4): X is T or S
  MISC_FEATURE (5)..(5): X is D and E for acidic amino acids
  MISC_FEATURE (6)..(6): X is K, R or H for basic amino acids
  MISC_FEATURE (7)..(7): X is I, L or V
  MISC_FEATURE (8)..(8): X is GabaX for X2X3 or X3X2 or X2X3 or X3X2 or X3X3 or X2X2
  MISC_FEATURE (9)..(9): X is T or S
  MISC_FEATURE (10)..(10): X is F, W or Y for aromatic amino acids
  MISC_FEATURE (11)..(11): X is F, W or Y for aromatic amino acids
  MISC_FEATURE (12)..(12): X is T or S
  MISC_FEATURE (13)..(13): X is K, R or H for basic amino acids
  MISC_FEATURE (14)..(14): X is N or Q for amidated amino acids
  MISC_FEATURE (15)..(15): X is F, W or Y for aromatic amino acids
  MISC_FEATURE (16)..(16): X is N or Q for amidated amino acids
  MISC_FEATURE (17)..(17): X is D and E for acidic amino acids
  MISC_FEATURE (18)..(18): X is F, W or Y for aromatic amino acids
  MISC_FEATURE (19)..(19): X is D and E for acidic amino acids
  MISC_FEATURE (20)..(20): X is F, W or Y for aromatic amino acids
  MISC_FEATURE (21)..(21): X is I, L or V
XXXXXXXXXXXXXXXXXXXXX

SEQ ID NO: 648 - protein, 20 aa, Artificial
  Completely synthesized peptide construct
  MISC_FEATURE (1)..(1): X is acetyl or propionyl group, D glycine or D alanine, cyclohexylalanine at amino terminus
  MISC_FEATURE (2)..(2): X is T or S
  MISC_FEATURE (3)..(3): X is A and G
  MISC_FEATURE (4)..(4): X is T or S
  MISC_FEATURE (5)..(5): X is D and E for acidic amino acids
  MISC_FEATURE (6)..(6): X is K, R or H for basic amino acids
  MISC_FEATURE (7)..(7): X is 5-aminopentanoic acid for replacement of 3 or 4 amino acids of X2 and X3
  MISC_FEATURE (8)..(8): X is T or S
  MISC_FEATURE (9)..(9): X is F, W or Y for aromatic amino acids
  MISC_FEATURE (10)..(10): X is F, W or Y for aromatic amino acids
  MISC_FEATURE (11)..(11): X is T or S
  MISC_FEATURE (12)..(12): X is K, R or H for basic amino acids
  MISC_FEATURE (13)..(13): X is N or Q for amidated amino acids
  MISC_FEATURE (14)..(14): X is F, W or Y for aromatic amino acids
  MISC_FEATURE (15)..(15): X is N or Q for amidated amino acids
  MISC_FEATURE (16)..(16): X is D and E for acidic amino acids
  MISC_FEATURE (17)..(17): X is F, W or Y for aromatic amino acids
  MISC_FEATURE (18)..(18): X is D and E for basic amino acids
  MISC_FEATURE (19)..(19): X is F, W or Y for aromatic amino acids
  MISC_FEATURE (20)..(20): X is I, L or V
XXXXXXXXXXXXXXXXXXXX

SEQ ID NO: 649 - protein, 13 aa, Artificial
  Completely synthesized peptide construct
HSLGKWLGHPDKF

SEQ ID NO: 650 - protein, 13 aa, Artificial
  Completely synthesized peptide construct
  MISC_FEATURE (1)..(1): X is K, R or H for basic amino acids
  MISC_FEATURE (2)..(2): X is T or S
  MISC_FEATURE (3)..(3): X is I, L or V
  MISC_FEATURE (4)..(4): X is A and G
  MISC_FEATURE (5)..(5): X is K, R or H for basic amino acids
  MISC_FEATURE (6)..(6): X is F, W or Y for aromatic amino acids
  MISC_FEATURE (7)..(7): X is I, L or V
  MISC_FEATURE (8)..(8): X is A and G
  MISC_FEATURE (9)..(9): X is K, R or H for basic amino acids
  MISC_FEATURE (10)..(10): X is F or P
  MISC_FEATURE (11)..(11): X is D and E for acidic amino acids
  MISC_FEATURE (12)..(12): X is K, R or H for basic amino acids
  MISC_FEATURE (13)..(13): X is F or P
XXXXXXXXXXXXX

SEQ ID NO: 651 - protein, 14 aa, Artificial
  Completely synthesized peptide construct
  MISC_FEATURE (1)..(1): X is acetyl or propionyl group, D glycine or D alanine, cyclohexylalanine at amino terminus
  MISC_FEATURE (2)..(2): X is K, R or H for basic amino acids
  MISC_FEATURE (3)..(3): X is T or S
  MISC_FEATURE (4)..(4): X is I, L or V
  MISC_FEATURE (5)..(5): X is A and G
  MISC_FEATURE (6)..(6): X is K, R or H for basic amino acids
  MISC_FEATURE (7)..(7): X is F, W or Y for aromatic amino acids
  MISC_FEATURE (8)..(8): X is I, L or V
  MISC_FEATURE (9)..(9): X is A and G
  MISC_FEATURE (10)..(10): X is K, R or H for basic amino acids
  MISC_FEATURE (11)..(11): X is F or P
  MISC_FEATURE (12)..(12): X is D and E for acidic amino acids
  MISC_FEATURE (13)..(13): X is K, R or H for basic amino acids
  MISC_FEATURE (14)..(14): X is F or P
XXXXXXXXXXXXXX

SEQ ID NO: 652 - protein, 16 aa, Artificial
  Completely synthesized peptide construct
VGWYRPPFSRVVHLYR

SEQ ID NO: 653 - protein, 16 aa, Artificial
  Completely synthesized peptide construct
  MISC_FEATURE (1)..(1): X is I, L or V
  MISC_FEATURE (2)..(2): X is A and G
  MISC_FEATURE (3)..(3): X is F, W or Y for aromatic amino acids
  MISC_FEATURE (4)..(4): X is F, W or Y for aromatic amino acids
  MISC_FEATURE (5)..(5): X is K, R or H for basic amino acids
  MISC_FEATURE (6)..(6): X is F or P
  MISC_FEATURE (7)..(7): X is F or P
  MISC_FEATURE (8)..(8): X is F or P
  MISC_FEATURE (9)..(9): X is T or S
  MISC_FEATURE (10)..(10): X is K, R or H for basic amino acids
  MISC_FEATURE (11)..(11): X is I, L or V
  MISC_FEATURE (12)..(12): X is I, L or V
  MISC_FEATURE (13)..(13): X is K, R or H for basic amino acids
  MISC_FEATURE (14)..(14): X is I, L or V
  MISC_FEATURE (15)..(15): X is F, W or Y for aromatic amino acids
  MISC_FEATURE (16)..(16): X is K, R or H for basic amino acids
XXXXXXXXXXXXXXXX

SEQ ID NO: 654 - protein, 15 aa, Artificial
  Completely synthesized peptide construct
  MISC_FEATURE (1)..(1): X is I, L or V
  MISC_FEATURE (2)..(2): X is A and G
  MISC_FEATURE (3)..(3): X is F, W or Y for aromatic amino acids
  MISC_FEATURE (4)..(4): X is F, W or Y for aromatic amino acids
  MISC_FEATURE (5)..(5): X is K, R or H for basic amino acids
  MISC_FEATURE (6)..(6): X is F or P
  MISC_FEATURE (7)..(7): X is F or P
  MISC_FEATURE (8)..(8): X is F or P
  MISC_FEATURE (9)..(9): X is T or S
  MISC_FEATURE (10)..(10): X is K, R or H for basic amino acids
  MISC_FEATURE (11)..(11): X is GabaX for X2X3 or X3X2 or X2X3 or X3X2 or X3X3 or X2X2
  MISC_FEATURE (12)..(12): X is K, R or H for basic amino acids
  MISC_FEATURE (13)..(13): X is I, L or V
  MISC_FEATURE (14)..(14): X is F, W or Y for aromatic amino acids
  MISC_FEATURE (15)..(15): X is K, R or H for basic amino acids
XXXXXXXXXXXXXXX

SEQ ID NO: 655 - protein, 17 aa, Artificial
  Completely synthesized peptide construct
  MISC_FEATURE (1)..(1): X is acetyl or propionyl group, D glycine or D alanine, cyclohexylalanine at amino terminus
  MISC_FEATURE (2)..(2): X is I, L or V
  MISC_FEATURE (3)..(3): X is A and G
  MISC_FEATURE (4)..(4): X is F, W or Y for aromatic amino acids
  MISC_FEATURE (5)..(5): X is F, W or Y for aromatic amino acids
  MISC_FEATURE (6)..(6): X is F, W or Y for aromatic amino acids
  MISC_FEATURE (7)..(7): X is F or P
  MISC_FEATURE (8)..(8): X is F or P
  MISC_FEATURE (9)..(9): X is F or P
  MISC_FEATURE (10)..(10): X is T or S
  MISC_FEATURE (11)..(11): X is K, R or H for basic amino acids
  MISC_FEATURE (12)..(12): X is I, L or V
  MISC_FEATURE (13)..(13): X is I, L or V
  MISC_FEATURE (14)..(14): X is K, R or H for basic amino acids
  MISC_FEATURE (15)..(15): X is I, L or V
  MISC_FEATURE (16)..(16): X is F, W or Y for aromatic amino acids
  MISC_FEATURE (17)..(17): X is K, R or H for basic amino acids
XXXXXXXXXXXXXXXXX

SEQ ID NO: 656 - protein, 16 aa, Artificial
  Completely synthesized peptide construct
  MISC_FEATURE (1)..(1): X is acetyl or propionyl group, D glycine or D alanine, cyclohexylalanine at amino terminus
  MISC_FEATURE (2)..(2): X is I, L or V
  MISC_FEATURE (3)..(3): X is A and G
  MISC_FEATURE (4)..(4): X is F, W or Y for aromatic amino acids
  MISC_FEATURE (5)..(5): X is F, W or Y for aromatic amino acids
  MISC_FEATURE (6)..(6): X is K, R or H for basic amino acids
  MISC_FEATURE (7)..(7): X is F or P
  MISC_FEATURE (8)..(8): X is F or P
  MISC_FEATURE (9)..(9): X is F or P
  MISC_FEATURE (10)..(10): X is T or S
  MISC_FEATURE (11)..(11): X is K, R or H for basic amino acids
  MISC_FEATURE (12)..(12): X is GabaX for X2X3 or X3X2 or X2X3 or X3X2 or X3X3 or X2X2
  MISC_FEATURE (13)..(13): X is K, R or H for basic amino acids
  MISC_FEATURE (14)..(14): X is I, L or V
  MISC_FEATURE (15)..(15): X is F, W or Y for aromatic amino acids
  MISC_FEATURE (16)..(16): X is K, R or H for basic amino acids
XXXXXXXXXXXXXXXX

SEQ ID NO: 657 - protein, 16 aa, Artificial
  Completely synthesized peptide construct
VFLCLQYRLRGKLRAE

SEQ ID NO: 658 - protein, 16 aa, Artificial
  Completely synthesized peptide construct
  MISC_FEATURE (1)..(1): X is I, L or V
  MISC_FEATURE (2)..(2): X is F or P
  MISC_FEATURE (3)..(3): X is I, L or V
  MISC_FEATURE (4)..(4): X is C or S
  MISC_FEATURE (5)..(5): X is I, L or V
  MISC_FEATURE (6)..(6): X is N or Q for amidated amino acids
  MISC_FEATURE (7)..(7): X is F, W or Y for aromatic amino acids
  MISC_FEATURE (8)..(8): X is K, R or H for basic amino acids
  MISC_FEATURE (9)..(9): X is I, L or V
  MISC_FEATURE (10)..(10): X is K, R or H for basic amino acids
  MISC_FEATURE (11)..(11): X is A and G
  MISC_FEATURE (12)..(12): X is K, R or H for basic amino acids
  MISC_FEATURE (13)..(13): X is I, L or V
  MISC_FEATURE (14)..(14): X is K, R or H for basic amino acids
  MISC_FEATURE (15)..(15): X is A and G
  MISC_FEATURE (16)..(16): X is D and E for acidic amino acids
XXXXXXXXXXXXXXXX

SEQ ID NO: 659 - protein, 17 aa, Artificial
  Completely synthesized peptide construct
  MISC_FEATURE (1)..(1): X is acetyl or propionyl group, D glycine or D alanine, cyclohexylalanine at amino terminus
  MISC_FEATURE (2)..(2): X is I, L or V
  MISC_FEATURE (3)..(3): X is F or P
  MISC_FEATURE (4)..(4): X is I, L or V
  MISC_FEATURE (5)..(5): X is C or S
  MISC_FEATURE (6)..(6): X is I, L or V
  MISC_FEATURE (7)..(7): X is N or Q for amidated amino acids
  MISC_FEATURE (8)..(8): X is F, W or Y for aromatic amino acids
  MISC_FEATURE (9)..(9): X is K, R or H for basic amino acids
  MISC_FEATURE (10)..(10): X is I, L or V
  MISC_FEATURE (11)..(11): X is K, R or H for basic amino acids
  MISC_FEATURE (12)..(12): X is A and G
  MISC_FEATURE (13)..(13): X is K, R or H for basic amino acids
  MISC_FEATURE (14)..(14): X is I, L or V
  MISC_FEATURE (15)..(15): X is K, R or H for basic amino acids
  MISC_FEATURE (16)..(16): X is A and G
  MISC_FEATURE (17)..(17): X is D and E for acidic amino acids
XXXXXXXXXXXXXXXXX

SEQ ID NO: 660 - protein, 21 aa, Artificial
  Completely synthesized peptide construct
MEVGWYRPPFSRVVHLYRNGK

SEQ ID NO: 661 - protein, 21 aa, Artificial
  Completely synthesized peptide construct
  MISC_FEATURE (1)..(1): X is M or Nle (Norleucine)
  MISC_FEATURE (2)..(2): X is D and E for acidic amino acids
  MISC_FEATURE (3)..(3): X is I, L or V
  MISC_FEATURE (4)..(4): X is A and G
  MISC_FEATURE (5)..(5): X is F, W or Y for aromatic amino acids
  MISC_FEATURE (6)..(6): X is F, W or Y for aromatic amino acids
  MISC_FEATURE (7)..(7): X is K, R or H for basic amino acids
  MISC_FEATURE (8)..(8): X is F or P
  MISC_FEATURE (9)..(9): X is F or P
  MISC_FEATURE (10)..(10): X is F or P
  MISC_FEATURE (11)..(11): X is T or S
  MISC_FEATURE (12)..(12): X is K, R or H for basic amino acids
  MISC_FEATURE (13)..(13): X is I, L or V
  MISC_FEATURE (14)..(14): X is I, L or V
  MISC_FEATURE (15)..(15): X is K, R or H for basic amino acids
  MISC_FEATURE (16)..(16): X is I, L or V
  MISC_FEATURE (17)..(17): X is F, W or Y for aromatic amino acids
  MISC_FEATURE (18)..(18): X is K, R or H for basic amino acids
  MISC_FEATURE (19)..(19): X is N or Q for amidated amino acids
  MISC_FEATURE (20)..(20): X is A and G
  MISC_FEATURE (21)..(21): X is K, R or H for basic amino acids
XXXXXXXXXXXXXXXXXXXXX

SEQ ID NO: 662 - protein, 20 aa, Artificial
  Completely synthesized peptide construct
  MISC_FEATURE (1)..(1): X is M or Nle (Norleucine)
  MISC_FEATURE (2)..(2): X is GabaX for X2X3 or X3X2 or X2X3 or X3X2 or X3X3 or X2X2
  MISC_FEATURE (3)..(3): X is A and G
  MISC_FEATURE (4)..(4): X is F, W or Y for aromatic amino acids
  MISC_FEATURE (5)..(5): X is F, W or Y for aromatic amino acids
  MISC_FEATURE (6)..(6): X is K, R or H for basic amino acids
  MISC_FEATURE (7)..(7): X is F or P
  MISC_FEATURE (8)..(8): X is F or P
  MISC_FEATURE (9)..(9): X is F or P
  MISC_FEATURE (10)..(10): X is T or S
  MISC_FEATURE (11)..(11): X is K, R or H for basic amino acids
  MISC_FEATURE (12)..(12): X is I, L or V
  MISC_FEATURE (13)..(13): X is I, L or V
  MISC_FEATURE (14)..(14): X is K, R or H for basic amino acids
  MISC_FEATURE (15)..(15): X is I, L or V
  MISC_FEATURE (16)..(16): X is F, W or Y for aromatic amino acids
  MISC_FEATURE (17)..(17): X is K, R or H for basic amino acids
  MISC_FEATURE (18)..(18): X is N or Q for amidated amino acids
  MISC_FEATURE (19)..(19): X is A and G
  MISC_FEATURE (20)..(20): X is K, R or H for basic amino acids
XXXXXXXXXXXXXXXXXXXX

SEQ ID NO: 663 - protein, 20 aa, Artificial
  Completely synthesized peptide construct
  MISC_FEATURE (1)..(1): X is M or Nle (Norleucine)
  MISC_FEATURE (2)..(2): X is D and E for acidic amino acids
  MISC_FEATURE (3)..(3): X is I, L or V
  MISC_FEATURE (4)..(4): X is A and G
  MISC_FEATURE (5)..(5): X is F, W or Y for aromatic amino acids
  MISC_FEATURE (6)..(6): X is F, W or Y for aromatic amino acids
  MISC_FEATURE (7)..(7): X is K, R or H for basic amino acids
  MISC_FEATURE (8)..(8): X is F or P
  MISC_FEATURE (9)..(9): X is F or P
  MISC_FEATURE (10)..(10): X is F or P
  MISC_FEATURE (11)..(11): X is T or S
  MISC_FEATURE (12)..(12): X is K, R or H for basic amino acids
  MISC_FEATURE (13)..(13): X is Gaba X for X2X3 or X3X2 or X2X3 or X3X2 or X3X3 or X2X2
  misc_feature (14)..(14): Xaa can be any naturally occurring amino acid
  MISC_FEATURE (15)..(15): X is I, L or V
  MISC_FEATURE (16)..(16): X is F, W or Y for aromatic amino acids
  MISC_FEATURE (17)..(17): X is K, R or H for basic amino acids
  MISC_FEATURE (18)..(18): X is N or Q for amidated amino acids
  MISC_FEATURE (19)..(19): X is A and G
  MISC_FEATURE (20)..(20): X is K, R or H for basic amino acids
XXXXXXXXXXXXXXXXXXXX

SEQ ID NO: 664 - protein, 19 aa, Artificial
  Completely synthesized peptide construct
  MISC_FEATURE (1)..(1): X is M or Nle (Norleucine)
  MISC_FEATURE (2)..(2): X is GabaX for X2X3 or X3X2 or X2X3 or X3X2 or X3X3 or X2X2
  MISC_FEATURE (3)..(3): X is A and G
  MISC_FEATURE (4)..(4): X is F, W or Y for aromatic amino acids
  MISC_FEATURE (5)..(5): X is F, W or Y for aromatic amino acids
  MISC_FEATURE (6)..(6): X is K, R or H for basic amino acids
  MISC_FEATURE (7)..(7): X is F or P
  MISC_FEATURE (8)..(8): X is F or P
  MISC_FEATURE (9)..(9): X is F or P
  MISC_FEATURE (10)..(10): X is T or S
  MISC_FEATURE (11)..(11): X is K, R or H for basic amino acids
  MISC_FEATURE (12)..(12): X is GabaX for X2X3 or X3X2 or X2X3 or X3X2 or X3X3 or X2X2
  MISC_FEATURE (13)..(13): X is K, R or H for basic amino acids
  MISC_FEATURE (14)..(14): X is I, L or V
  MISC_FEATURE (15)..(15): X is F, W or Y for aromatic amino acids
  MISC_FEATURE (16)..(16): X is K, R or H for basic amino acids
  MISC_FEATURE (17)..(17): X is N or Q for amidated amino acids
  MISC_FEATURE (18)..(18): X is A and G
  MISC_FEATURE (19)..(19): X is K, R or H for basic amino acids
XXXXXXXXXXXXXXXXXXX

SEQ ID NO: 665 - protein, 22 aa, Artificial
  Completely synthesized peptide construct
  MISC_FEATURE (1)..(1): X is acetyl or propionyl group, D glycine or D alanine, cyclohexylalanine at amino terminus
  MISC_FEATURE (2)..(2): X is M or Nle (Norleucine)
  MISC_FEATURE (3)..(3): X is D or E for acidic amino acids
  MISC_FEATURE (4)..(4): X is I, L or V
  MISC_FEATURE (5)..(5): X is A and G
  MISC_FEATURE (6)..(6): X is F, W or Y for aromatic amino acids
  MISC_FEATURE (7)..(7): X is F, W or Y for aromatic amino acids
  MISC_FEATURE (8)..(8): X is K, R or H for basic amino acids
  MISC_FEATURE (9)..(9): X is F or P
  MISC_FEATURE (10)..(10): X is F or P
  MISC_FEATURE (11)..(11): X is F or P
  MISC_FEATURE (12)..(12): X is T or S
  MISC_FEATURE (13)..(13): X is K, R or H for basic amino acids
  MISC_FEATURE (14)..(14): X is I, L or V
  MISC_FEATURE (15)..(15): X is I, L or V
  MISC_FEATURE (16)..(16): X is K, R or H for basic amino acids
  MISC_FEATURE (17)..(17): X is I, L or V
  MISC_FEATURE (18)..(18): X is F, W or Y for aromatic amino acids
  MISC_FEATURE (19)..(19): X is K, R or H for basic amino acids
  MISC_FEATURE (20)..(20): X is N or Q for amidated amino acids
  MISC_FEATURE (21)..(21): X is A and G
  MISC_FEATURE (22)..(22): X is K, R or H for basic amino acids
XXXXXXXXXXXXXXXXXXXXXX

SEQ ID NO: 666 - protein, 21 aa, Artificial
  Completely synthesized peptide construct
  MISC_FEATURE (1)..(1): X is acetyl or propionyl group, D glycine or D alanine, cyclohexylalanine at amino terminus
  MISC_FEATURE (2)..(2): X is M or Nle(Norleucine)
  MISC_FEATURE (3)..(3): X is GabaX for X2X3 or X3X2 or X2X3 or X3X2 or X3X3 or X2X2
  MISC_FEATURE (4)..(4): X is A and G
  MISC_FEATURE (5)..(5): X is F, W or Y for aromatic amino acids
  MISC_FEATURE (6)..(6): X is F, W or Y for aromatic amino acids
  MISC_FEATURE (7)..(7): X is K, R or H for basic amino acids
  MISC_FEATURE (8)..(8): X is F or P
  MISC_FEATURE (9)..(9): X is F or P
  MISC_FEATURE (10)..(10): X is F or P
  MISC_FEATURE (11)..(11): X is T or S
  MISC_FEATURE (12)..(12): X is K, R or H for basic amino acids
  MISC_FEATURE (13)..(13): X is I, L or V
  MISC_FEATURE (14)..(14): X is I, L or V
  MISC_FEATURE (15)..(15): X is K, R or H for basic amino acids
  MISC_FEATURE (16)..(16): X is I, L or V
  MISC_FEATURE (17)..(17): X is F, W or Y for aromatic amino acids
  MISC_FEATURE (18)..(18): X is K, R or H for basic amino acids
  MISC_FEATURE (19)..(19): X is N or Q for amidated amino acids
  MISC_FEATURE (20)..(20): X is A and G
  MISC_FEATURE (21)..(21): X is K, R or H for basic amino acids
XXXXXXXXXXXXXXXXXXXXX

SEQ ID NO: 667 - protein, 21 aa, Artificial
  Completely synthesized peptide construct
  MISC_FEATURE (1)..(1): X is acetyl or propionyl group, D glycine or D alanine, cyclohexylalanine at amino terminus
  MISC_FEATURE (2)..(2): X is M or Nle (Norleucine)
  MISC_FEATURE (3)..(3): X is D and E for acidic amino acids
  MISC_FEATURE (4)..(4): X is I, L or V
  MISC_FEATURE (5)..(5): X is A and G
  MISC_FEATURE (6)..(6): X is F, W or Y for aromatic amino acids
  MISC_FEATURE (7)..(7): X is F, W or Y for aromatic amino acids
  MISC_FEATURE (8)..(8): X is K, R or H for basic amino acids
  MISC_FEATURE (9)..(9): X is F or P
  MISC_FEATURE (10)..(10): X is F or P
  MISC_FEATURE (11)..(11): X is F or P
  MISC_FEATURE (12)..(12): X is T or S
  MISC_FEATURE (13)..(13): X is K, R or H for basic amino acids
  MISC_FEATURE (14)..(14): X is GabaX for X2X3 or X3X2 or X2X3 or X3X2 or X3X3 or X2X2
  MISC_FEATURE (15)..(15): X is K, R or H for basic amino acids
  MISC_FEATURE (16)..(16): X is I, L or V
  MISC_FEATURE (17)..(17): X is F, W or Y for aromatic amino acids
  MISC_FEATURE (18)..(18): X is K, R or H for basic amino acids
  MISC_FEATURE (19)..(19): X is N or Q for amidated amino acids
  MISC_FEATURE (20)..(20): X is A and G
  MISC_FEATURE (21)..(21): X is K, R or H for basic amino acids
XXXXXXXXXXXXXXXXXXXXX

SEQ ID NO: 668 - protein, 20 aa, Artificial
  Completely synthesized peptide construct
  MISC_FEATURE (1)..(1): X is acetyl or propionyl group, D glycine or D alanine, cyclohexylalanine at amino terminus
  MISC_FEATURE (2)..(2): X is M or Nle (Norleucine)
  MISC_FEATURE (3)..(3): X is GabaX for X2X3 or X3X2 or X2X3 or X3X2 or X3X3 or X2X2
  MISC_FEATURE (4)..(4): X is A and G
  MISC_FEATURE (5)..(5): X is F, W or Y for aromatic amino acids
  MISC_FEATURE (6)..(6): X is F, W or Y for aromatic amino acids
  MISC_FEATURE (7)..(7): X is K, R or H for basic amino acids
  MISC_FEATURE (8)..(8): X is F or P
  MISC_FEATURE (9)..(9): X is F or P
  MISC_FEATURE (10)..(10): X is F or P
  MISC_FEATURE (11)..(11): X is T or S
  MISC_FEATURE (12)..(12): X is K, R or H for basic amino acids
  MISC_FEATURE (13)..(13): X is GabaX for X2X3 or X3X2 or X2X3 or X3X2 or X3X3 or X2X2
  MISC_FEATURE (14)..(14): X is K, R or H for basic amino acids
  MISC_FEATURE (15)..(15): X is I, L or V
  MISC_FEATURE (16)..(16): X is F, W or Y for aromatic amino acids
  MISC_FEATURE (17)..(17): X is K, R or H for basic amino acids
  MISC_FEATURE (18)..(18): X is N or Q for amidated amino acids
  MISC_FEATURE (19)..(19): X is A and G
  MISC_FEATURE (20)..(20): X is K, R or H for basic amino acids
XXXXXXXXXXXXXXXXXXXX

SEQ ID NO: 669 - protein, 14 aa, Artificial
  Completely synthesized peptide construct
DGSSWEGVGVVPDV

SEQ ID NO: 670 - protein, 8 aa, Artificial
  Completely synthesized peptide construct
TSSEVATE

SEQ ID NO: 671 - protein, 8 aa, Artificial
  Completely synthesized peptide construct
  MISC_FEATURE (1)..(1): X is T or S
  MISC_FEATURE (2)..(2): X is T or S
  MISC_FEATURE (3)..(3): X is T or S
  MISC_FEATURE (4)..(4): X is D and E for acidic amino acids
  MISC_FEATURE (5)..(5): X is I, L or V
  MISC_FEATURE (6)..(6): X is A and G
  MISC_FEATURE (7)..(7): X is T or S
  MISC_FEATURE (8)..(8): X is D and E for acidic amino acids
XXXXXXXX

SEQ ID NO: 672 - protein, 7 aa, Artificial
  Completely synthesized peptide construct
  MISC_FEATURE (1)..(1): X is T or S
  MISC_FEATURE (2)..(2): X is T or S
  MISC_FEATURE (3)..(3): X is T or S
  MISC_FEATURE (4)..(4): X is GabaX for X2X3 or X3X2 or X2X3 or X3X2 or X3X3 or X2X2
  MISC_FEATURE (5)..(5): X is A and G
  MISC_FEATURE (6)..(6): X is T or S
  MISC_FEATURE (7)..(7): X is D and E for acidic amino acids
XXXXXXX

SEQ ID NO: 673 - protein, 9 aa, Artificial
  Completely synthesized peptide construct
  MISC_FEATURE (1)..(1): X is acetyl or propionyl group, D glycine or D alanine, cyclohexylalanine at amino terminus
  MISC_FEATURE (2)..(2): X is T or S
  MISC_FEATURE (3)..(3): X is T or S
  MISC_FEATURE (4)..(4): X is T or S
  MISC_FEATURE (5)..(5): X is D and E for acidic amino acids
  MISC_FEATURE (6)..(6): X is I, L or V
  MISC_FEATURE (7)..(7): X is A and G
  MISC_FEATURE (8)..(8): X is T or S
  MISC_FEATURE (9)..(9): X is D and E for acidic amino acids
XXXXXXXXX

SEQ ID NO: 674 - protein, 8 aa, Artificial
  Completely synthesized peptide construct
  MISC_FEATURE (1)..(1): X is acetyl or propionyl group, D glycine or D alanine, cyclohexylalanine at amino terminus
  MISC_FEATURE (2)..(2): X is T or S
  MISC_FEATURE (3)..(3): X is T or S
  MISC_FEATURE (4)..(4): X is T or S
  MISC_FEATURE (5)..(5): X is GabaX for X2X3 or X3X2 or X2X3 or X3X2 or X3X3 or X2X2
  MISC_FEATURE (6)..(6): X is A and G
  MISC_FEATURE (7)..(7): X is T or S
  MISC_FEATURE (8)..(8): X is D and E for acidic amino acids
XXXXXXXX

SEQ ID NO: 675 - protein, 8 aa, Artificial
  Completely synthesized peptide construct
TSSEAATE

SEQ ID NO: 676 - protein, 8 aa, Artificial
  Completely synthesized peptide construct
DTNLASST

SEQ ID NO: 677 - protein, 8 aa, Artificial
  Completely synthesized peptide construct
DTALASST

SEQ ID NO: 678 - protein, 8 aa, Artificial
  Completely synthesized peptide construct
  MISC_FEATURE (1)..(1): X is T or S
  MISC_FEATURE (2)..(2): X is T or S
  MISC_FEATURE (3)..(3): X is T or S
  MISC_FEATURE (4)..(4): X is D and E for acidic amino acids
  MISC_FEATURE (5)..(5): X is A and G
  MISC_FEATURE (6)..(6): X is A and G
  MISC_FEATURE (7)..(7): X is T or S
  MISC_FEATURE (8)..(8): X is D and E for acidic amino acids
XXXXXXXX

SEQ ID NO: 679 - protein, 9 aa, Artificial
  Completely synthesized peptide construct
  MISC_FEATURE (1)..(1): X is acetyl or propionyl group, D glycine or D alanine, cyclohexylalanine at amino terminus
  MISC_FEATURE (2)..(2): X is T or S
  MISC_FEATURE (3)..(3): X is T or S
  MISC_FEATURE (4)..(4): X is T or S
  MISC_FEATURE (5)..(5): X is D and E for acidic amino acids
  MISC_FEATURE (6)..(6): X is A and G
  MISC_FEATURE (7)..(7): X is A and G
  MISC_FEATURE (8)..(8): X is T or S
  MISC_FEATURE (9)..(9): X is D and E for acidic amino acids
XXXXXXXXX

SEQ ID NO: 680 - protein, 20 aa, Artificial
  Completely synthesized peptide construct
GPTHLFQPSLVLDMAKVLLD

SEQ ID NO: 681 - protein, 20 aa, Artificial
  Completely synthesized peptide construct
  MISC_FEATURE (1)..(1): X is A and G
  MISC_FEATURE (2)..(2): X is F or P
  MISC_FEATURE (3)..(3): X is T or S
  MISC_FEATURE (4)..(4): X is K, R or H for basic amino acids
  MISC_FEATURE (5)..(5): X is I, L or V
  MISC_FEATURE (6)..(6): X is F, W or Y for aromatic amino acids
  MISC_FEATURE (7)..(7): X is N or Q for amidated amino acids
  MISC_FEATURE (8)..(8): X is F or P
  MISC_FEATURE (9)..(9): X is T or S
  MISC_FEATURE (10)..(10): X is I, L or V
  MISC_FEATURE (11)..(11): X is I, L or V
  MISC_FEATURE (12)..(12): X is I, L or V
  MISC_FEATURE (13)..(13): X is D and E for acidic amino acids
  MISC_FEATURE (14)..(14): X is M or Nle (Norleucine)
  MISC_FEATURE (15)..(15): X is A and G
  MISC_FEATURE (16)..(16): X is K, R or H for basic amino acids
  MISC_FEATURE (17)..(17): X is I, L or V
  MISC_FEATURE (18)..(18): X is I, L or V
  MISC_FEATURE (19)..(19): X is I, L or V
  MISC_FEATURE (20)..(20): X is D and E for acidic amino acids
XXXXXXXXXXXXXXXXXXXX

SEQ ID NO: 682 - protein, 19 aa, Artificial
  Completely synthesized peptide construct
  MISC_FEATURE (1)..(1): X is A and G
  MISC_FEATURE (2)..(2): X is F or P
  MISC_FEATURE (3)..(3): X is T or S
  MISC_FEATURE (4)..(4): X is K, R or H for basic amino acids
  MISC_FEATURE (5)..(5): X is I, L or V
  MISC_FEATURE (6)..(6): X is F, W or Y for aromatic amino acids
  MISC_FEATURE (7)..(7): X is N or Q for amidated amino acids
  MISC_FEATURE (8)..(8): X is F or P
  MISC_FEATURE (9)..(9): X is T or S
  MISC_FEATURE (10)..(10): X is GabaX for X2X3 or X3X2 or X2X3 or X3X2 or X3X3 or X2X2
  MISC_FEATURE (11)..(11): X is I, L or V
  MISC_FEATURE (12)..(12): X is D and E for acidic amino acids
  MISC_FEATURE (13)..(13): X is M or Nle (Norleucine)
  MISC_FEATURE (14)..(14): X is A and G
  MISC_FEATURE (15)..(15): X is K, R or H for basic amino acids
  MISC_FEATURE (16)..(16): X is I, L or V
  MISC_FEATURE (17)..(17): X is I, L or V
  MISC_FEATURE (18)..(18): X is I, L or V
  MISC_FEATURE (19)..(19): X is D and E for acidic amino acids
XXXXXXXXXXXXXXXXXXX

SEQ ID NO: 683 - protein, 19 aa, Artificial
  Completely synthesized peptide construct
  MISC_FEATURE (1)..(1): X is A and G
  MISC_FEATURE (2)..(2): X is F or P
  MISC_FEATURE (3)..(3): X is T or S
  MISC_FEATURE (4)..(4): X is K, R or H for basic amino acids
  MISC_FEATURE (5)..(5): X is I, L or V
  MISC_FEATURE (6)..(6): X is F, W or Y for aromatic amino acids
  MISC_FEATURE (7)..(7): X is N or Q for amidated amino acids
  MISC_FEATURE (8)..(8): X is F or P
  MISC_FEATURE (9)..(9): X is T or S
  MISC_FEATURE (10)..(10): X is I, L or V
  MISC_FEATURE (11)..(11): X is GabaX for X2X3 or X3X2 or X2X3 or X3X2 or X3X3 or X2X2
  MISC_FEATURE (12)..(12): X is D and E for acidic amino acids
  MISC_FEATURE (13)..(13): X is M or Nle (Norleucine)
  MISC_FEATURE (14)..(14): X is A and G
  MISC_FEATURE (15)..(15): X is K, R or H for basic amino acids
  MISC_FEATURE (16)..(16): X is I, L or V
  MISC_FEATURE (17)..(17): X is I, L or V
  MISC_FEATURE (18)..(18): X is I, L or V
  MISC_FEATURE (19)..(19): X is D and E for acidic amino acids
XXXXXXXXXXXXXXXXXXX

SEQ ID NO: 684 - protein, 19 aa, Artificial
  Completely synthesized peptide construct
  MISC_FEATURE (1)..(1): X is A and G
  MISC_FEATURE (2)..(2): X is F or P
  MISC_FEATURE (3)..(3): X is T or S
  MISC_FEATURE (4)..(4): X is K, R or H for basic amino acids
  MISC_FEATURE (5)..(5): X is I, L or V
  MISC_FEATURE (6)..(6): X is F, W or Y for aromatic amino acids
  MISC_FEATURE (7)..(7): X is N or Q for amidated amino acids
  MISC_FEATURE (8)..(8): X is F or P
  MISC_FEATURE (9)..(9): X is T or S
  MISC_FEATURE (10)..(10): X is I, L or V
  MISC_FEATURE (11)..(11): X is I, L or V
  MISC_FEATURE (12)..(12): X is GabaX for X2X3 or X3X2 or X2X3 or X3X2 or X3X3 or X2X2
  MISC_FEATURE (13)..(13): X is M or Nle (Norleucine)
  MISC_FEATURE (14)..(14): X is A and G
  MISC_FEATURE (15)..(15): X is K, R or H for basic amino acids
  MISC_FEATURE (16)..(16): X is I, L or V
  MISC_FEATURE (17)..(17): X is I, L or V
  MISC_FEATURE (18)..(18): X is I, L or V
  MISC_FEATURE (19)..(19): X is D and E for basic amino acids
XXXXXXXXXXXXXXXXXXX

SEQ ID NO: 685 - protein, 19 aa, Artificial
  Completely synthesized peptide construct
  MISC_FEATURE (1)..(1): X is A and G
  MISC_FEATURE (2)..(2): X is F or P
  MISC_FEATURE (3)..(3): X is T or S
  MISC_FEATURE (4)..(4): X is K, R or H for basic amino acids
  MISC_FEATURE (5)..(5): X is I, L or V
  MISC_FEATURE (6)..(6): X is F, W or Y for aromatic amino acids
  MISC_FEATURE (7)..(7): X is N or Q for amidated amino acids
  MISC_FEATURE (8)..(8): X is F or P
  MISC_FEATURE (9)..(9): X is T or S
  MISC_FEATURE (10)..(10): X is I, L or V
  MISC_FEATURE (11)..(11): X is I, L or V
  MISC_FEATURE (12)..(12): X is I, L or V
  MISC_FEATURE (13)..(13): X is D and E for acidic amino acids
  MISC_FEATURE (14)..(14): X is M or Nle (Norleucine)
  MISC_FEATURE (15)..(15): X is A and G
  MISC_FEATURE (16)..(16): X is K, R or H for basic amino acids
  MISC_FEATURE (17)..(17): X is GabaX for X2X3 or X3X2 or X2X3 or X3X2 or X3X3 or X2X2
  MISC_FEATURE (18)..(18): X is I, L or V
  MISC_FEATURE (19)..(19): X is D and E for acidic amino acids
XXXXXXXXXXXXXXXXXXX

SEQ ID NO: 686 - protein, 19 aa, Artificial
  Completely synthesized peptide construct
  MISC_FEATURE (1)..(1): X is A and G
  MISC_FEATURE (2)..(2): X is F or P
  MISC_FEATURE (3)..(3): X is T or S
  MISC_FEATURE (4)..(4): X is K, R or H for basic amino acids
  MISC_FEATURE (5)..(5): X is I, L or V
  MISC_FEATURE (6)..(6): X is F, W or Y for aromatic amino acids
  MISC_FEATURE (7)..(7): X is N or Q for amidated amino acids
  MISC_FEATURE (8)..(8): X is F or P
  MISC_FEATURE (9)..(9): X is T or S
  MISC_FEATURE (10)..(10): X is I, L or V
  MISC_FEATURE (11)..(11): X is I, L or V
  MISC_FEATURE (12)..(12): X is I, L or V
  MISC_FEATURE (13)..(13): X is D and E for acidic amino acids
  MISC_FEATURE (14)..(14): X is M or Nle (Norleucine)
  MISC_FEATURE (15)..(15): X is A and G
  MISC_FEATURE (16)..(16): X is K, R or H for basic amino acids
  MISC_FEATURE (17)..(17): X is I, L or V
  MISC_FEATURE (18)..(18): X is GabaX for X2X3 or X3X2 or X2X3 or X3X2 or X3 X3 or X2X2
  MISC_FEATURE (19)..(19): X is D and E for acidic amino acids
XXXXXXXXXXXXXXXXXXX

SEQ ID NO: 687 - protein, 19 aa, Artificial
  Completely synthesized peptide construct
  MISC_FEATURE (1)..(1): X is A and G
  MISC_FEATURE (2)..(2): X is F or P
  MISC_FEATURE (3)..(3): X is T or S
  MISC_FEATURE (4)..(4): X is K, R or H for basic amino acids
  MISC_FEATURE (5)..(5): X is I, L or V
  MISC_FEATURE (6)..(6): X is F, W or Y for aromatic amino acids
  MISC_FEATURE (7)..(7): X is N or Q for amidated amino acids
  MISC_FEATURE (8)..(8): X is F or P
  MISC_FEATURE (9)..(9): X is T or S
  MISC_FEATURE (10)..(10): X is I, L or V
  MISC_FEATURE (11)..(11): X is I, L or V
  MISC_FEATURE (12)..(12): X is I, L or V
  MISC_FEATURE (13)..(13): X is D and E for acidic amino acids
  MISC_FEATURE (14)..(14): X is M or Nle (Norleucine)
  MISC_FEATURE (15)..(15): X is A and G
  MISC_FEATURE (16)..(16): X is K, R or H for basic amino acids
  MISC_FEATURE (17)..(17): X is I, L or V
  MISC_FEATURE (18)..(18): X is I, L or V
  MISC_FEATURE (19)..(19): X is GabaX for X2X3 or X3X2 or X2X3 or X3X2 or X3X3 or X2X2
XXXXXXXXXXXXXXXXXXX

SEQ ID NO: 688 - protein, 18 aa, Artificial
  Completely synthesized peptide construct
  MISC_FEATURE (1)..(1): X is A and G
  MISC_FEATURE (2)..(2): X is F or P
  MISC_FEATURE (3)..(3): X is T or S
  MISC_FEATURE (4)..(4): X is K, R or H for basic amino acids
  MISC_FEATURE (5)..(5): X is I, L or V
  MISC_FEATURE (6)..(6): X is F, W or Y for aromatic amino acids
  MISC_FEATURE (7)..(7): X is N or Q for amidated amino acids
  MISC_FEATURE (8)..(8): X is T or S
  MISC_FEATURE (9)..(9): X is I, L or V
  MISC_FEATURE (10)..(10): X is I, L or V
  MISC_FEATURE (11)..(11): X is I, L or V
  MISC_FEATURE (12)..(12): X is D and E for acidic amino acids
  MISC_FEATURE (13)..(13): X is D and E for acidic amino acids
  MISC_FEATURE (14)..(14): X is M or Nle (Norleucine)
  MISC_FEATURE (15)..(15): X is A and G
  MISC_FEATURE (16)..(16): X is K, R or H for basic amino acids
  MISC_FEATURE (17)..(17): X is I, L or V
  MISC_FEATURE (18)..(18): X is 5-aminopentanoic acid for replacement of 3 or 4 amino acids of X2 and X3
XXXXXXXXXXXXXXXXXX

SEQ ID NO: 689 - protein, 18 aa, Artificial
  Completely synthesized peptide construct
  MISC_FEATURE (1)..(1): X is A and G
  MISC_FEATURE (2)..(2): X is F or P
  MISC_FEATURE (3)..(3): X is T or S
  MISC_FEATURE (4)..(4): X is K, R or H for basic amino acids
  MISC_FEATURE (5)..(5): X is I, L or V
  MISC_FEATURE (6)..(6): X is F, W or Y for aromatic amino acids
  MISC_FEATURE (7)..(7): X is N or Q for amidated amino acids
  MISC_FEATURE (8)..(8): X is F or P
  MISC_FEATURE (9)..(9): X is T or S
  MISC_FEATURE (10)..(10): X is I, L or V
  MISC_FEATURE (11)..(11): X is I, L or V
  MISC_FEATURE (12)..(12): X is I, L or V
  MISC_FEATURE (13)..(13): X is D and E for acidic amino acids
  MISC_FEATURE (14)..(14): X is M or Nle (Norleucine)
  MISC_FEATURE (15)..(15): X is A and G
  MISC_FEATURE (16)..(16): X is K, R or H for basic amino acids
  MISC_FEATURE (17)..(17): X is 5-aminopentanoic acid for replacement of 3 or 4 amino acids of X2 or X3
  MISC_FEATURE (18)..(18): X is D and E for acidic amino acids
XXXXXXXXXXXXXXXXXX

SEQ ID NO: 690 - protein, 18 aa, Artificial
  Completely synthesized peptide construct
  MISC_FEATURE (1)..(1): X is A and G
  MISC_FEATURE (2)..(2): X is F or P
  MISC_FEATURE (3)..(3): X is T or S
  MISC_FEATURE (4)..(4): X is K,  R or H for basic amino acids
  MISC_FEATURE (5)..(5): X is I, L or V
  MISC_FEATURE (6)..(6): X is F, W or Y for aromatic amino acids
  MISC_FEATURE (7)..(7): X is N or Q for amidated amino acids
  MISC_FEATURE (8)..(8): X is F or P
  MISC_FEATURE (9)..(9): X is T or S
  MISC_FEATURE (10)..(10): X is 5-aminopentanoic acid for replacement of 3 or 4 amino acids of X2 and X3
  MISC_FEATURE (11)..(11): X is D and E for acidic amino acids
  MISC_FEATURE (12)..(12): X is M or Nle (Norleucine)
  MISC_FEATURE (13)..(13): X is A and G
  MISC_FEATURE (14)..(14): X is K, R or H for basic amino acids
  MISC_FEATURE (15)..(15): X is I, L or V
  MISC_FEATURE (16)..(16): X is I, L or V
  MISC_FEATURE (17)..(17): X is I, L or V
  MISC_FEATURE (18)..(18): X is D and E for acidic amino acids
XXXXXXXXXXXXXXXXXX

SEQ ID NO: 691 - protein, 17 aa, Artificial
  Completely synthesized peptide construct
  MISC_FEATURE (1)..(1): X is A and G
  MISC_FEATURE (2)..(2): X is F or P
  MISC_FEATURE (3)..(3): X is T or S
  MISC_FEATURE (4)..(4): X is K, R or H for basic amino acids
  MISC_FEATURE (5)..(5): X is I, L or V
  MISC_FEATURE (6)..(6): X is F, W or Y for aromatic amino acids
  MISC_FEATURE (7)..(7): X is N or Q for amidated amino acids
  MISC_FEATURE (8)..(8): X is F or P
  MISC_FEATURE (9)..(9): X is T or S
  MISC_FEATURE (10)..(10): X is 5-aminopentanoic acid for replacement of 3 or 4 amino acids of X2 and X3
  MISC_FEATURE (11)..(11): X is M or Nle (Norleucine)
  MISC_FEATURE (12)..(12): X is A and G
  MISC_FEATURE (13)..(13): X is K, R or H for basic amino acids
  MISC_FEATURE (14)..(14): X is I, L or V
  MISC_FEATURE (15)..(15): X is I, L or V
  MISC_FEATURE (16)..(16): X is I, L or V
  MISC_FEATURE (17)..(17): X is D and E for acidic amino acids
XXXXXXXXXXXXXXXXX

SEQ ID NO: 692 - protein, 18 aa, Artificial
  Completely synthesized peptide construct
  MISC_FEATURE (1)..(1): X is A and G
  MISC_FEATURE (2)..(2): X is F or P
  MISC_FEATURE (3)..(3): X is T or S
  MISC_FEATURE (4)..(4): X is K, R or H for basic amino acids
  MISC_FEATURE (5)..(5): X is I, L or V
  MISC_FEATURE (6)..(6): X is F, W or Y for aromatic amino acids
  MISC_FEATURE (7)..(7): X is N or Q for amidated amino acids
  MISC_FEATURE (8)..(8): X is F or P
  MISC_FEATURE (9)..(9): X is T or S
  MISC_FEATURE (10)..(10): X is I, L or V
  MISC_FEATURE (11)..(11): X is 5-aminopentanoic acid for replacement of 3 or 4 amino acids of X2 and X3
  MISC_FEATURE (12)..(12): X is M or Nle (Norleucine)
  MISC_FEATURE (13)..(13): X is A and G
  MISC_FEATURE (14)..(14): X is K, R or H for basic amino acids
  MISC_FEATURE (15)..(15): X is I, L or V
  MISC_FEATURE (16)..(16): X is I, L or V
  MISC_FEATURE (17)..(17): X is I, L or V
  MISC_FEATURE (18)..(18): X is D and E for acidic amino acids
XXXXXXXXXXXXXXXXXX

SEQ ID NO: 693 - protein, 19 aa, Artificial
  Completely synthesized peptide construct
  MISC_FEATURE (1)..(1): X is A and G
  MISC_FEATURE (2)..(2): X is F or P
  MISC_FEATURE (3)..(3): X is T or S
  MISC_FEATURE (4)..(4): X is K, R or H for basic amino acids
  MISC_FEATURE (5)..(5): X is I, L or V
  MISC_FEATURE (6)..(6): X is F, W or Y for aromatic amino acids
  MISC_FEATURE (7)..(7): X is N or Q for amidated amino acids
  MISC_FEATURE (8)..(8): X is F or P
  MISC_FEATURE (9)..(9): X is T or S
  MISC_FEATURE (10)..(10): X is GabaX for X2X3 or X3X2 or X2X3 or X3X2 or X3X3 or X2X2
  MISC_FEATURE (11)..(11): X is I, L or V
  MISC_FEATURE (12)..(12): X is D and E for acidic amino acids
  MISC_FEATURE (13)..(13): X is M or Nle (Norleucine)
  MISC_FEATURE (14)..(14): X is A and G
  MISC_FEATURE (15)..(15): X is K, R or H for basic amino acids
  MISC_FEATURE (16)..(16): X is I, L or V
  MISC_FEATURE (17)..(17): X is I, L or V
  MISC_FEATURE (18)..(18): X is I, L or V
  MISC_FEATURE (19)..(19): X is D and E for acidic amino acids
XXXXXXXXXXXXXXXXXXX

SEQ ID NO: 694 - protein, 19 aa, Artificial
  Completely synthesized peptide construct
  MISC_FEATURE (1)..(1): X is A and G
  MISC_FEATURE (2)..(2): X is F or P
  MISC_FEATURE (3)..(3): X is T or S
  MISC_FEATURE (4)..(4): X is K, R or H for basic amino acids
  MISC_FEATURE (5)..(5): X is I, L or V
  MISC_FEATURE (6)..(6): X is F, W or Y for aromatic amino acids
  MISC_FEATURE (7)..(7): X is N or Q for amidated amino acids
  MISC_FEATURE (8)..(8): X is F or P
  MISC_FEATURE (9)..(9): X is T or S
  MISC_FEATURE (10)..(10): X is I, L or V
  MISC_FEATURE (11)..(11): X is GabaX for X2X3 or X3X2 or X2X3 or X3X2 or X3X3 or X2X2
  MISC_FEATURE (12)..(12): X is D and E for acidic amino acids
  MISC_FEATURE (13)..(13): X is M or Nle (Norleucine)
  MISC_FEATURE (14)..(14): X is A and G
  MISC_FEATURE (15)..(15): X is K, R or H for basic amino acids
  MISC_FEATURE (16)..(16): X is I, L or V
  MISC_FEATURE (17)..(17): X is I, L or V
  MISC_FEATURE (18)..(18): X is I, L or V
  MISC_FEATURE (19)..(19): X is D and E for acidic amino acids
XXXXXXXXXXXXXXXXXXX

SEQ ID NO: 695 - protein, 19 aa, Artificial
  Completely synthesized peptide construct
  MISC_FEATURE (1)..(1): X is A and G
  MISC_FEATURE (2)..(2): X is F or P
  MISC_FEATURE (3)..(3): X is T or S
  MISC_FEATURE (4)..(4): X is K, R or H for basic amino acids
  MISC_FEATURE (5)..(5): X is I, L or V
  MISC_FEATURE (6)..(6): X is F, W or Y for aromatic amino acids
  MISC_FEATURE (7)..(7): X is N or Q for amidated amino acids
  MISC_FEATURE (8)..(8): X is F or P
  MISC_FEATURE (9)..(9): X is T or S
  MISC_FEATURE (10)..(10): X is I, L or V
  MISC_FEATURE (11)..(11): X is I, L or V
  MISC_FEATURE (12)..(12): X is GabaX for X2X3 or X3X2 or X2X3 or X3X2 or X3X3 or X2X2
  MISC_FEATURE (13)..(13): X is M or Nle (Norleucine)
  MISC_FEATURE (14)..(14): X is A and G
  MISC_FEATURE (15)..(15): X is K, R or H for basic amino acids
  MISC_FEATURE (16)..(16): X is I, L or V
  MISC_FEATURE (17)..(17): X is I, L or V
  MISC_FEATURE (18)..(18): X is I, L or V
  MISC_FEATURE (19)..(19): X is D and E for acidic amino acids
XXXXXXXXXXXXXXXXXXX

SEQ ID NO: 696 - protein, 19 aa, Artificial
  Completely synthesized peptide construct
  MISC_FEATURE (1)..(1): X is A and G
  MISC_FEATURE (2)..(2): X is F or P
  MISC_FEATURE (3)..(3): X is T or S
  MISC_FEATURE (4)..(4): X is K, R or H for basic amino acids
  MISC_FEATURE (5)..(5): X is I, L or V
  MISC_FEATURE (6)..(6): X is F, W or Y for aromatic amino acids
  MISC_FEATURE (7)..(7): X is N or Q for amidated amino acids
  MISC_FEATURE (8)..(8): X is F or P
  MISC_FEATURE (9)..(9): X is T or S
  MISC_FEATURE (10)..(10): X is I, L or V
  MISC_FEATURE (11)..(11): X is I, L or V
  MISC_FEATURE (12)..(12): X is I, L or V
  MISC_FEATURE (13)..(13): X is D and E for acidic amino acids
  MISC_FEATURE (14)..(14): X is M or Nle (Norleucine)
  MISC_FEATURE (15)..(15): X is A and G
  MISC_FEATURE (16)..(16): X is K, R or H for basic amino acids
  MISC_FEATURE (17)..(17): X is GabaX for X2X3 or X3X2 or X2X3 or X3X2 or X3X3 or X2X2
  MISC_FEATURE (18)..(18): X is I, L or V
  MISC_FEATURE (19)..(19): X is D and E for acidic amino acids
XXXXXXXXXXXXXXXXXXX

SEQ ID NO: 697 - protein, 19 aa, Artificial
  Completely synthesized peptide construct
  MISC_FEATURE (1)..(1): X is A and G
  MISC_FEATURE (2)..(2): X is F or P
  MISC_FEATURE (3)..(3): X is T or S
  MISC_FEATURE (4)..(4): X is K, R or H for basic amino acids
  MISC_FEATURE (5)..(5): X is I, L or V
  MISC_FEATURE (6)..(6): X is F, W or Y for aromatic amino acids
  MISC_FEATURE (7)..(7): X is N or Q for amidated amino acids
  MISC_FEATURE (8)..(8): X is F or P
  MISC_FEATURE (9)..(9): X is T or S
  MISC_FEATURE (10)..(10): X is I, L or V
  MISC_FEATURE (11)..(11): X is I, L or V
  MISC_FEATURE (12)..(12): X is I, L or V
  MISC_FEATURE (13)..(13): X is D and E for acidic amino acids
  MISC_FEATURE (14)..(14): X is M or Nle (Norleucine)
  MISC_FEATURE (15)..(15): X is A and G
  MISC_FEATURE (16)..(16): X is K, R or H for basic amino acids
  MISC_FEATURE (17)..(17): X is I, L or V
  MISC_FEATURE (18)..(18): X is GabaX for X2X3 or X3X2 or X2X3 or X3X2 or X3X3 or X2X2
  MISC_FEATURE (19)..(19): X is D and E for acidic amino acids
XXXXXXXXXXXXXXXXXXX

SEQ ID NO: 698 - protein, 19 aa, Artificial
  Completely synthesized peptide construct
  MISC_FEATURE (1)..(1): X is A and G
  MISC_FEATURE (2)..(2): X is F or P
  MISC_FEATURE (3)..(3): X is T or S
  MISC_FEATURE (4)..(4): X is K, R or H for basic amino acids
  MISC_FEATURE (5)..(5): X is I, L or V
  MISC_FEATURE (6)..(6): X is F, W or Y for aromatic amino acids
  MISC_FEATURE (7)..(7): X is N or Q for amidated amino acids
  MISC_FEATURE (8)..(8): X is F or P
  MISC_FEATURE (9)..(9): X is T or S
  MISC_FEATURE (10)..(10): X is I, L or V
  MISC_FEATURE (11)..(11): X is I, L or V
  MISC_FEATURE (12)..(12): X is I, L or V
  MISC_FEATURE (13)..(13): X is D and E for acidic amino acids
  MISC_FEATURE (14)..(14): X is M or Nle (Norleucine)
  MISC_FEATURE (15)..(15): X is A and G
  MISC_FEATURE (16)..(16): X is K, R or H for basic amino acids
  MISC_FEATURE (17)..(17): X is I, L or V
  MISC_FEATURE (18)..(18): X is I, L or V
  MISC_FEATURE (19)..(19): X is GabaX for X2X3 or X3X2 or X2X3 or X3X2 or X3X3 or X2X2
XXXXXXXXXXXXXXXXXXX

SEQ ID NO: 699 - protein, 20 aa, Artificial
  Completely synthesized peptide construct
  MISC_FEATURE (1)..(1): X is A and G
  MISC_FEATURE (2)..(2): X is F or P
  MISC_FEATURE (3)..(3): X is T or S
  MISC_FEATURE (4)..(4): X is K, R or H for basic amino acids
  MISC_FEATURE (5)..(5): X is I, L or V
  MISC_FEATURE (6)..(6): X is F, W or Y for aromatic amino acids
  MISC_FEATURE (7)..(7): X is N or Q for amidated amino acids
  MISC_FEATURE (8)..(8): X is F or P
  MISC_FEATURE (9)..(9): X is T or S
  MISC_FEATURE (10)..(10): X is I, L or V
  MISC_FEATURE (11)..(11): X is I, L or V
  MISC_FEATURE (12)..(12): X is I, L or V
  MISC_FEATURE (13)..(13): X is D and E for acidic amino acids
  MISC_FEATURE (14)..(14): X is M or Nle (Norleucine)
  MISC_FEATURE (15)..(15): X is A and G
  MISC_FEATURE (16)..(16): X is K, R or H for basic amino acids
  MISC_FEATURE (17)..(17): X is I, L or V
  MISC_FEATURE (18)..(18): X is I, L or V
  MISC_FEATURE (19)..(19): X is I, L or V
  MISC_FEATURE (20)..(20): X is D and E for acidic amino acids
XXXXXXXXXXXXXXXXXXXX

SEQ ID NO: 700 - protein, 19 aa, Artificial
  Completely synthesized peptide construct
  MISC_FEATURE (1)..(1): X is A and G
  MISC_FEATURE (2)..(2): X is F or P
  MISC_FEATURE (3)..(3): X is T or S
  MISC_FEATURE (4)..(4): X is K, R or H for basic amino acids
  MISC_FEATURE (5)..(5): X is I, L or V
  MISC_FEATURE (6)..(6): X is F, W or Y for aromatic amino acids
  MISC_FEATURE (7)..(7): X is N or Q for amidated amino acids
  MISC_FEATURE (8)..(8): X is F or P
  MISC_FEATURE (9)..(9): X is T or S
  MISC_FEATURE (10)..(10): X is GabaX for X2X3 or X3X2 or X2X3 or X3X2 or X3X3 or X2X2
  MISC_FEATURE (11)..(11): X is I, L or V
  MISC_FEATURE (12)..(12): X is D and E for acidic amino acids
  MISC_FEATURE (13)..(13): X is M or Nle (Norleucine)
  MISC_FEATURE (14)..(14): X is A and G
  MISC_FEATURE (15)..(15): X is K, R or H for basic amino acids
  MISC_FEATURE (16)..(16): X is I, L or V
  MISC_FEATURE (17)..(17): X is I, L or V
  MISC_FEATURE (18)..(18): X is I, L or V
  MISC_FEATURE (19)..(19): X is D and E for acidic amino acids
XXXXXXXXXXXXXXXXXXX

SEQ ID NO: 701 - protein, 19 aa, Artificial
  Completely synthesized peptide construct
  MISC_FEATURE (1)..(1): X is A and G
  MISC_FEATURE (2)..(2): X is F or P
  MISC_FEATURE (3)..(3): X is T or S
  MISC_FEATURE (4)..(4): X is K, R or H for basic amino acids
  MISC_FEATURE (5)..(5): X is I, L or V
  MISC_FEATURE (6)..(6): X is F, W or Y for aromatic amino acids
  MISC_FEATURE (7)..(7): X is N or Q for amidated amino acids
  MISC_FEATURE (8)..(8): X is F or P
  MISC_FEATURE (9)..(9): X is T or S
  MISC_FEATURE (10)..(10): X is I, L or V
  MISC_FEATURE (11)..(11): X is GabaX for X2X3 or X3X2 or X2X3 or X3X2 or X3X3 or X2X2
  MISC_FEATURE (12)..(12): X is D and E for acidic amino acids
  MISC_FEATURE (13)..(13): X is M or Nle (Norleucine)
  MISC_FEATURE (14)..(14): X is A and G
  MISC_FEATURE (15)..(15): X is K, R or H for basic amino acids
  MISC_FEATURE (16)..(16): X is I, L or V
  MISC_FEATURE (17)..(17): X is I, L or V
  MISC_FEATURE (18)..(18): X is I, L or V
  MISC_FEATURE (19)..(19): X is D and E for acidic amino acids
XXXXXXXXXXXXXXXXXXX

SEQ ID NO: 702 - protein, 19 aa, Artificial
  Completely synthesized peptide construct
  MISC_FEATURE (1)..(1): X is A and G
  MISC_FEATURE (2)..(2): X is F or P
  MISC_FEATURE (3)..(3): X is T or S
  MISC_FEATURE (4)..(4): X is K, R or H for basic amino acids
  MISC_FEATURE (5)..(5): X is I, L or V
  MISC_FEATURE (6)..(6): X is F, W or Y for aromatic amino acids
  MISC_FEATURE (7)..(7): X is N or Q for amidated amino acids
  MISC_FEATURE (8)..(8): X is F or P
  MISC_FEATURE (9)..(9): X is T or S
  MISC_FEATURE (10)..(10): X is I, L or V
  MISC_FEATURE (11)..(11): X is I, L or V
  MISC_FEATURE (12)..(12): X is GabaX for X2X3 or X3X2 or X2X3 or X3X2 or X3X3 or X2X2
  MISC_FEATURE (13)..(13): X is M or Nle (Norleucine)
  MISC_FEATURE (14)..(14): X is A and G
  MISC_FEATURE (15)..(15): X is A and G
  MISC_FEATURE (16)..(16): X is I, L or V
  MISC_FEATURE (17)..(17): X is I, L or V
  MISC_FEATURE (18)..(18): X is I, L or V
  MISC_FEATURE (19)..(19): X is D and E for acidic amino acids
XXXXXXXXXXXXXXXXXXX

SEQ ID NO: 703 - protein, 19 aa, Artificial
  Completely synthesized peptide construct
  MISC_FEATURE (1)..(1): X is F or P
  MISC_FEATURE (1)..(1): X is A and G
  MISC_FEATURE (2)..(2): X is F or P
  MISC_FEATURE (3)..(3): X is T or S
  MISC_FEATURE (4)..(4): X is K, R or H for basic amino acids
  MISC_FEATURE (5)..(5): X is I, L or V
  MISC_FEATURE (6)..(6): X is F, W or Y for aromatic amino acids
  MISC_FEATURE (7)..(7): X is N or Q for amidated amino acids
  MISC_FEATURE (8)..(8): X is F or P
  MISC_FEATURE (9)..(9): X is T or S
  MISC_FEATURE (10)..(10): X is I, L or V
  MISC_FEATURE (11)..(11): X is I, L or V
  MISC_FEATURE (12)..(12): X is I, L or V
  MISC_FEATURE (13)..(13): X is D and E for acidic amino acids
  MISC_FEATURE (14)..(14): X is M or Nle (Norleucine)
  MISC_FEATURE (15)..(15): X is A and G
  MISC_FEATURE (16)..(16): X is K, R or H for basic amino acids
  MISC_FEATURE (17)..(17): X is GabaX for X2X3 or X3X2 or X2X3 or X3X2 or X3X3 or X2X2
  MISC_FEATURE (18)..(18): X is I, L or V
  MISC_FEATURE (19)..(19): X is D and E for acidic amino acids
XXXXXXXXXXXXXXXXXXX

SEQ ID NO: 704 - protein, 19 aa, Artificial
  Completely synthesized peptide construct
  MISC_FEATURE (1)..(1): X is A and G
  MISC_FEATURE (2)..(2): X is F or P
  MISC_FEATURE (3)..(3): X is T or S
  MISC_FEATURE (4)..(4): X is K, R or H for basic amino acids
  MISC_FEATURE (5)..(5): X is I, L or V
  MISC_FEATURE (6)..(6): X is F, W or Y for aromatic amino acids
  MISC_FEATURE (7)..(7): X is N or Q for amidated amino acids
  MISC_FEATURE (8)..(8): X is F or P
  MISC_FEATURE (9)..(9): X is T or S
  MISC_FEATURE (10)..(10): X is I, L or V
  MISC_FEATURE (11)..(11): X is I, L or V
  MISC_FEATURE (12)..(12): X is I, L or V
  MISC_FEATURE (13)..(13): X is D and E for acidic amino acids
  MISC_FEATURE (14)..(14): X is M or Nle (Norleucine)
  MISC_FEATURE (15)..(15): X is A and G
  MISC_FEATURE (16)..(16): X is K, R or H for basic amino acids
  MISC_FEATURE (17)..(17): X is I, L or V
  MISC_FEATURE (18)..(18): X is GabaX for X2X3 or X3X2 or X2X3 or X3X2 or X3X3 or X2X2
  MISC_FEATURE (19)..(19): X is D and E for acidic amino acids
XXXXXXXXXXXXXXXXXXX

SEQ ID NO: 705 - protein, 19 aa, Artificial
  Completely synthesized peptide construct
  MISC_FEATURE (1)..(1): X is A and G
  MISC_FEATURE (2)..(2): X is F or P
  MISC_FEATURE (3)..(3): X is T or S
  MISC_FEATURE (4)..(4): X is K, R or H for basic amino acids
  MISC_FEATURE (5)..(5): X is I, L or V
  MISC_FEATURE (6)..(6): X is F, W or Y for aromatic amino acids
  MISC_FEATURE (7)..(7): X is N or Q for amidated amino acids
  MISC_FEATURE (8)..(8): X is F or P
  MISC_FEATURE (9)..(9): X is T or S
  MISC_FEATURE (10)..(10): X is I, L or V
  MISC_FEATURE (11)..(11): X is I, L or V
  MISC_FEATURE (12)..(12): X is I, L or V
  MISC_FEATURE (13)..(13): X is D and E for acidic amino acids
  MISC_FEATURE (14)..(14): X is M or Nle (Norleucine)
  MISC_FEATURE (15)..(15): X is A and G
  MISC_FEATURE (16)..(16): X is K, R or H for basic amino acids
  MISC_FEATURE (17)..(17): X is I, L or V
  MISC_FEATURE (18)..(18): X is I, L or V
  MISC_FEATURE (19)..(19): X is GabaX for X2X3 or X3X2 or X2X3 or X3X2 or X3X3 or X2X2
XXXXXXXXXXXXXXXXXXX

SEQ ID NO: 706 - protein, 18 aa, Artificial
  Completely synthesized peptide construct
  MISC_FEATURE (1)..(1): X is A and G
  MISC_FEATURE (2)..(2): X is F or P
  MISC_FEATURE (3)..(3): X is K, R or H for basic amino acids
  MISC_FEATURE (4)..(4): X is I, L or V
  MISC_FEATURE (5)..(5): X is F, W or Y for aromatic amino acids
  MISC_FEATURE (6)..(6): X is F, W or Y for aromatic amino acids
  MISC_FEATURE (7)..(7): X is N or Q for amidated amino acids
  MISC_FEATURE (8)..(8): X is F or P
  MISC_FEATURE (9)..(9): X is T or S
  MISC_FEATURE (10)..(10): X is I, L or V
  MISC_FEATURE (11)..(11): X is I, L or V
  MISC_FEATURE (12)..(12): X is I, L or V
  MISC_FEATURE (13)..(13): X is D and E for acidic amino acids
  MISC_FEATURE (14)..(14): X is M or Nle (Norleucine)
  MISC_FEATURE (15)..(15): X is A and G
  MISC_FEATURE (16)..(16): X is K, R or H for basic amino acids
  MISC_FEATURE (17)..(17): X is I, L or V
  MISC_FEATURE (18)..(18): X is 5-aminopentanoic acid for replacement of 3 or 4 amino acids of X2 or X3
XXXXXXXXXXXXXXXXXX

SEQ ID NO: 707 - protein, 18 aa, Artificial
  Completely synthesized peptide construct
  MISC_FEATURE (1)..(1): X is A and G
  MISC_FEATURE (2)..(2): X is F or P
  MISC_FEATURE (3)..(3): X is T or S
  MISC_FEATURE (4)..(4): X is K, R or H for basic amino acids
  MISC_FEATURE (5)..(5): X is I, L or V
  MISC_FEATURE (6)..(6): X is F, W or Y for aromatic amino acids
  MISC_FEATURE (7)..(7): X is N or Q for amidated amino acids
  MISC_FEATURE (8)..(8): X is F or P
  MISC_FEATURE (9)..(9): X is T or S
  MISC_FEATURE (10)..(10): X is I, L or V
  MISC_FEATURE (11)..(11): X is I, L or V
  MISC_FEATURE (12)..(12): X is I, L or V
  MISC_FEATURE (13)..(13): X is D and E for acidic amino acids
  MISC_FEATURE (14)..(14): X is M or Nle (Norleucine)
  MISC_FEATURE (15)..(15): X is A and G
  MISC_FEATURE (16)..(16): X is K, R or H for basic amino acids
  MISC_FEATURE (17)..(17): X is 5-aminopentanoic acid for replacement of 3 or 4 amino acids of X2 or X3
  MISC_FEATURE (18)..(18): X is D and E for acidic amino acids
XXXXXXXXXXXXXXXXXX

SEQ ID NO: 708 - protein, 18 aa, Artificial
  Completely synthesized peptide construct
  MISC_FEATURE (1)..(1): X is A and G
  MISC_FEATURE (2)..(2): X is F or P
  MISC_FEATURE (3)..(3): X is T or S
  MISC_FEATURE (4)..(4): X is K, R or H for basic amino acids
  MISC_FEATURE (5)..(5): X is I, L or V
  MISC_FEATURE (6)..(6): X is F, W or Y for aromatic amino acids
  MISC_FEATURE (7)..(7): X is N or Q for amidated amino acids
  MISC_FEATURE (8)..(8): X is F or P
  MISC_FEATURE (9)..(9): X is T or S
  MISC_FEATURE (10)..(10): X is 5-aminopentanoic acid for replacement of 3 or 4 amino acids of X2 or X3
  MISC_FEATURE (11)..(11): X is D and E for acidic amino acids
  MISC_FEATURE (12)..(12): X is M or Nle (Norleucine)
  MISC_FEATURE (13)..(13): X is A and G
  MISC_FEATURE (14)..(14): X is K, R or H for basic amino acids
  MISC_FEATURE (15)..(15): X is I, L or V
  MISC_FEATURE (16)..(16): X is I, L or V
  MISC_FEATURE (17)..(17): X is I, L or V
  MISC_FEATURE (18)..(18): X is D and E for acidic amino acids
XXXXXXXXXXXXXXXXXX

SEQ ID NO: 709 - protein, 17 aa, Artificial
  Completely synthesized peptide construct
  MISC_FEATURE (1)..(1): X is A and G
  MISC_FEATURE (2)..(2): X is F or P
  MISC_FEATURE (3)..(3): X is T or S
  MISC_FEATURE (4)..(4): X is K, R or H for basic amino acids
  MISC_FEATURE (5)..(5): X is I, L or V
  MISC_FEATURE (6)..(6): X is F, W or Y for aromatic amino acids
  MISC_FEATURE (7)..(7): X is N or Q for amidated amino acids
  MISC_FEATURE (8)..(8): X is F or P
  MISC_FEATURE (9)..(9): X is T or S
  MISC_FEATURE (10)..(10): X is 5-aminopentanoic acid for replacement of 3 or 4 amino acids of X2 of X3
  MISC_FEATURE (11)..(11): X is M or Nle (Norleucine)
  MISC_FEATURE (12)..(12): X is A and G
  MISC_FEATURE (13)..(13): X is K, R or H for basic amino acids
  MISC_FEATURE (14)..(14): X is I, L or V
  MISC_FEATURE (15)..(15): X is I, L or V
  MISC_FEATURE (16)..(16): X is I, L or V
  MISC_FEATURE (17)..(17): X is D and E for acidic amino acids
XXXXXXXXXXXXXXXXX

SEQ ID NO: 710 - protein, 18 aa, Artificial
  Completely synthesized peptide construct
  MISC_FEATURE (1)..(1): X is A and G
  MISC_FEATURE (2)..(2): X is F or P
  MISC_FEATURE (3)..(3): X is T or S
  MISC_FEATURE (4)..(4): X is K, R or H for basic amino acids
  MISC_FEATURE (5)..(5): X is I, L or V
  MISC_FEATURE (6)..(6): X is F, W or Y for aromatic amino acids
  MISC_FEATURE (7)..(7): X is N or Q for amidated amino acids
  MISC_FEATURE (8)..(8): X is F or P
  MISC_FEATURE (9)..(9): X is T or S
  MISC_FEATURE (10)..(10): X is 5-aminopentanoic acid for replacement of 3 or 4 amino acids of X2 or X3
  MISC_FEATURE (11)..(11): X is M or Nle (Norleucine)
  MISC_FEATURE (12)..(12): X is A and G
  MISC_FEATURE (13)..(13): X is K, R or H for basic amino acids
  MISC_FEATURE (14)..(14): X is I, L or V
  MISC_FEATURE (15)..(15): X is I, L or V
  MISC_FEATURE (16)..(16): X is I, L or V
  MISC_FEATURE (17)..(17): X is I, L or V
  MISC_FEATURE (18)..(18): X is D and E for acidic amino acids
XXXXXXXXXXXXXXXXXX

SEQ ID NO: 711 - protein, 19 aa, Artificial
  Completely synthesized peptide construct
  MISC_FEATURE (1)..(1): X is A and G
  MISC_FEATURE (2)..(2): X is F or P
  MISC_FEATURE (3)..(3): X is T or S
  MISC_FEATURE (4)..(4): X is K, R or H for basic amino acids
  MISC_FEATURE (5)..(5): X is I, L or V
  MISC_FEATURE (6)..(6): X is F, W or Y for aromatic amino acids
  MISC_FEATURE (7)..(7): X is N or Q for amidated amino acids
  MISC_FEATURE (8)..(8): X is F or P
  MISC_FEATURE (9)..(9): X is T or S
  MISC_FEATURE (10)..(10): X is GabaX for X2X3 or X3X2 or X2X3 or X3X2 or X3X3 or X2X2
  MISC_FEATURE (11)..(11): X is I, L or V
  MISC_FEATURE (12)..(12): X is D and E for acidic amino acids
  MISC_FEATURE (13)..(13): X is M or Nle (Norleucine)
  MISC_FEATURE (14)..(14): X is A andG
  MISC_FEATURE (15)..(15): X is K, R or H for basic amino acids
  MISC_FEATURE (16)..(16): X is I, L or V
  MISC_FEATURE (17)..(17): X is I, L or V
  MISC_FEATURE (18)..(18): X is I, L or V
  MISC_FEATURE (19)..(19): X is D and E for acidic amino acids
XXXXXXXXXXXXXXXXXXX

SEQ ID NO: 712 - protein, 19 aa, Artificial
  Completely synthesized peptide construct
  MISC_FEATURE (1)..(1): X is A and G
  MISC_FEATURE (2)..(2): X is F or P
  MISC_FEATURE (3)..(3): X is T or S
  MISC_FEATURE (4)..(4): X is K, R or H for basic amino acids
  MISC_FEATURE (5)..(5): X is I, L or V
  MISC_FEATURE (6)..(6): X is F, W or Y for aromatic amino acids
  MISC_FEATURE (7)..(7): X is N or Q for amidated amino acids
  MISC_FEATURE (8)..(8): X is F or P
  MISC_FEATURE (9)..(9): X is T or S
  MISC_FEATURE (10)..(10): X is I, L or V
  MISC_FEATURE (11)..(11): X is GabaX for X2X3 or X3X2 or X2X3 or X3X2 or X3X3 or X2X2
  MISC_FEATURE (12)..(12): X is D and E for acidic amino acids
  MISC_FEATURE (13)..(13): X is M or Nle (Norleucine)
  MISC_FEATURE (14)..(14): X is A and G
  MISC_FEATURE (15)..(15): X is K, R or H for basic amino acids
  MISC_FEATURE (16)..(16): X is I, L or V
  MISC_FEATURE (17)..(17): X is I, L or V
  MISC_FEATURE (18)..(18): X is I, L or V
  MISC_FEATURE (19)..(19): X is D and E for acidic amino acids
XXXXXXXXXXXXXXXXXXX

SEQ ID NO: 713 - protein, 19 aa, Artificial
  Completely synthesized peptide construct
  MISC_FEATURE (1)..(1): X is A and G
  MISC_FEATURE (2)..(2): X is F or P
  MISC_FEATURE (3)..(3): X is T or S
  MISC_FEATURE (4)..(4): X is K, R or H for basic amino acids
  MISC_FEATURE (5)..(5): X is I, L or V
  MISC_FEATURE (6)..(6): X is F, W or Y for aromatic amino acids
  MISC_FEATURE (7)..(7): X is N or Q for amidated amino acids
  MISC_FEATURE (8)..(8): X is F or P
  MISC_FEATURE (9)..(9): X is T or S
  MISC_FEATURE (10)..(10): X is I, L or V
  MISC_FEATURE (11)..(11): X is I, L or V
  MISC_FEATURE (12)..(12): X is GabaX for X2X3 or X3X2 or X2X3 or X3X2 or X3X3 or X2X2
  MISC_FEATURE (13)..(13): X is M or Nle (Norleucine)
  MISC_FEATURE (14)..(14): X is A and G
  MISC_FEATURE (15)..(15): X is K, R or H for basic amino acids
  MISC_FEATURE (16)..(16): X is I, L or V
  MISC_FEATURE (17)..(17): X is I, L or V
  MISC_FEATURE (18)..(18): X is I, L or V
  MISC_FEATURE (19)..(19): X is D and E for acidic amino acids
XXXXXXXXXXXXXXXXXXX

SEQ ID NO: 714 - protein, 17 aa, Artificial
  Completely synthesized peptide construct
  MISC_FEATURE (1)..(1): X is A and G
  MISC_FEATURE (2)..(2): X is F or P
  MISC_FEATURE (3)..(3): X is T or S
  MISC_FEATURE (4)..(4): X is K, R or H for basic amino acids
  MISC_FEATURE (5)..(5): X is I, L or V
  MISC_FEATURE (6)..(6): X is F, W or Y for aromatic amino acids
  MISC_FEATURE (7)..(7): X is N or Q for amidated amino acids
  MISC_FEATURE (8)..(8): X is F or P
  MISC_FEATURE (9)..(9): X is T or S
  MISC_FEATURE (10)..(10): X is 5-aminopentanoic acid for replacement of 3 or 4 amino acids at X2 or X3
  MISC_FEATURE (11)..(11): X is D and E for acidic amino acids
  MISC_FEATURE (12)..(12): X is M or Nle (Norleucine)
  MISC_FEATURE (13)..(13): X is A and G
  MISC_FEATURE (14)..(14): X is K, R or H for basic amino acids
  MISC_FEATURE (15)..(15): X is GabaX for X2X3 or X3X2 or X2X3 or X3X2 or X3X3 or X2X2
  MISC_FEATURE (16)..(16): X is I, L or V
  MISC_FEATURE (17)..(17): X is D and E for acidic amino acids
XXXXXXXXXXXXXXXXX

SEQ ID NO: 715 - protein, 15 aa, Artificial
  Completely synthesized peptide construct
  MISC_FEATURE (1)..(1): X is A and G
  MISC_FEATURE (2)..(2): X is F or P
  MISC_FEATURE (3)..(3): X is T or S
  MISC_FEATURE (4)..(4): X is K, R or H for basic amino acids
  MISC_FEATURE (5)..(5): X is I, L or V
  MISC_FEATURE (6)..(6): X is F, W or Y for aromatic amino acids
  MISC_FEATURE (7)..(7): X is N or Q for amidated amino acids
  MISC_FEATURE (8)..(8): X is F or P
  MISC_FEATURE (9)..(9): X is T or S
  MISC_FEATURE (10)..(10): X is 5-aminopentanoic acid for replacement of 3 or 4 amino acids of X2 or X3
  MISC_FEATURE (11)..(11): X is M or Nle (Norleucine)
  MISC_FEATURE (12)..(12): X is A and G
  MISC_FEATURE (13)..(13): X is K, R or H for basic amino acids
  MISC_FEATURE (14)..(14): X is 5-aminopentanoic acid for replacement of 3 or 4 amino acids of X2 or X3
  MISC_FEATURE (15)..(15): X is D and E for acidic amino acids
XXXXXXXXXXXXXXX

SEQ ID NO: 716 - protein, 14 aa, Artificial
  Completely synthesized peptide construct
  MISC_FEATURE (1)..(1): X is A and G
  MISC_FEATURE (2)..(2): X is F or P
  MISC_FEATURE (3)..(3): X is T or S
  MISC_FEATURE (4)..(4): X is K, R or H for basic amino acids
  MISC_FEATURE (5)..(5): X is I, L or V
  MISC_FEATURE (6)..(6): X is F, W or Y for aromatic amino acids
  MISC_FEATURE (7)..(7): X is N or Q for amidated amino acids
  MISC_FEATURE (8)..(8): X is F or P
  MISC_FEATURE (9)..(9): X is T or S
  MISC_FEATURE (10)..(10): X is 5-aminopentanoic acid for replacement of 3 or 4 amino acids of X2 and X3
  MISC_FEATURE (11)..(11): X is M or Nle (Norleucine)
  MISC_FEATURE (12)..(12): X is A and G
  MISC_FEATURE (13)..(13): X is K, R or H for basic amino acids
  MISC_FEATURE (14)..(14): X is 5-aminopentanoic aacid for replacement of 3 or 4 amino acids of X2 and X3
XXXXXXXXXXXXXX

SEQ ID NO: 717 - protein, 21 aa, Artificial
  Completely synthesized peptide construct
  MISC_FEATURE (1)..(1): X is acetyl or propionyl group, D glycine or D alanine, cyclohexylalanine at amino terminus
  MISC_FEATURE (2)..(2): X is A and G
  MISC_FEATURE (3)..(3): X is F or P
  MISC_FEATURE (4)..(4): X is T or S
  MISC_FEATURE (5)..(5): X is K, R or H for basic amino acids
  MISC_FEATURE (6)..(6): X is I, L or V
  MISC_FEATURE (7)..(7): X is F, W or Y for aromatic amino acids
  MISC_FEATURE (8)..(8): X is N or Q for amidated amino acids
  MISC_FEATURE (9)..(9): X is F or P
  MISC_FEATURE (10)..(10): X is T or S
  MISC_FEATURE (11)..(11): X is I, L or V
  MISC_FEATURE (12)..(12): X is I, L or V
  MISC_FEATURE (13)..(13): X is I, L or V
  MISC_FEATURE (14)..(14): X is A and G
  MISC_FEATURE (15)..(15): X is M or Nle (Norleucine)
  MISC_FEATURE (16)..(16): X is A and G
  MISC_FEATURE (17)..(17): X is K, R or H for basic amino acids
  MISC_FEATURE (18)..(18): X is I, L or V
  MISC_FEATURE (19)..(19): X is I, L or V
  MISC_FEATURE (20)..(20): X is I, L or V
  MISC_FEATURE (21)..(21): X is D and E for acidic amino acids
XXXXXXXXXXXXXXXXXXXXX

SEQ ID NO: 718 - protein, 20 aa, Artificial
  Completely synthesized peptide construct
  MISC_FEATURE (1)..(1): X is acetyl or propionyl group, D glycine or D alanine, cyclohexylalanine at amino terminus
  MISC_FEATURE (2)..(2): X is A and G
  MISC_FEATURE (3)..(3): X is F or P
  MISC_FEATURE (4)..(4): X is T or S
  MISC_FEATURE (5)..(5): X is K, R or H for basic amino acids
  MISC_FEATURE (6)..(6): X is I, L or V
  MISC_FEATURE (7)..(7): X is F, W or Y for aromatic amino acids
  MISC_FEATURE (8)..(8): X is N or Q for amidated amino acids
  MISC_FEATURE (9)..(9): X is F or P
  MISC_FEATURE (10)..(10): X is T or S
  MISC_FEATURE (11)..(11): X is GabaX for X2X3 or X3X2 or X2X3 or X3X2 or X3X3 or X2X2
  MISC_FEATURE (12)..(12): X is I, L or V
  MISC_FEATURE (13)..(13): X is D and E for acidic amino acids
  MISC_FEATURE (14)..(14): X is M or Nle (Norleucine)
  MISC_FEATURE (15)..(15): X is A and G
  MISC_FEATURE (16)..(16): X is K, R or H for basic amino acids
  MISC_FEATURE (17)..(17): X is I, L or V
  MISC_FEATURE (18)..(18): X is I, L or V
  MISC_FEATURE (19)..(19): X is I, L or V
  MISC_FEATURE (20)..(20): X is D and E for acidic amino acids
XXXXXXXXXXXXXXXXXXXX

SEQ ID NO: 719 - protein, 20 aa, Artificial
  Completely synthesized peptide construct
  MISC_FEATURE (1)..(1): X is acetyl or propionyl group, D glycine or D alanine, cyclhexylalanine at amino terminus
  MISC_FEATURE (2)..(2): X is A and G
  MISC_FEATURE (3)..(3): X is F or P
  MISC_FEATURE (4)..(4): X is T or S
  MISC_FEATURE (5)..(5): X is K, R or H for basic amino acids
  MISC_FEATURE (6)..(6): X is I, L or V
  MISC_FEATURE (7)..(7): X is F, W or Y for aromatic amino acids
  MISC_FEATURE (8)..(8): X is N or Q for amidated amino acids
  MISC_FEATURE (9)..(9): X is F or P
  MISC_FEATURE (10)..(10): X is T or S
  MISC_FEATURE (11)..(11): X is I, L or V
  MISC_FEATURE (12)..(12): X is GabaX for X2X3 or X3X2 or X2X3 or X3X2 or X3X3 or X2X2
  MISC_FEATURE (13)..(13): X is D and E for acidic amino acids
  MISC_FEATURE (14)..(14): X is M or Nle (Norleucine)
  MISC_FEATURE (15)..(15): X is A and G
  MISC_FEATURE (16)..(16): X is K, R or H for basic amino acids
  MISC_FEATURE (17)..(17): X is I, L or V
  MISC_FEATURE (18)..(18): X is I, L or V
  MISC_FEATURE (19)..(19): X is I, L or V
  MISC_FEATURE (20)..(20): X is D and E for acidic amino acids
XXXXXXXXXXXXXXXXXXXX

SEQ ID NO: 720 - protein, 20 aa, Artificial
  Completely synthesized peptide construct
  MISC_FEATURE (1)..(1): X is acetyl or propionyl group, D glycine or D alanine, cyclohexylalanine at amino terminus
  MISC_FEATURE (2)..(2): X is A and G
  MISC_FEATURE (3)..(3): X is F or P
  MISC_FEATURE (4)..(4): X is T or S
  MISC_FEATURE (5)..(5): X is K, R or H for basic amino acids
  MISC_FEATURE (6)..(6): X is I, L or V
  MISC_FEATURE (7)..(7): X is F, W or Y for aromatic amino acids
  MISC_FEATURE (8)..(8): X is N or Q for amidated amino acids
  MISC_FEATURE (9)..(9): X is F or P
  MISC_FEATURE (10)..(10): X is T or S
  MISC_FEATURE (11)..(11): X is I, L or V
  MISC_FEATURE (12)..(12): X is I, L or V
  MISC_FEATURE (13)..(13): X is GabaX for X2X3 or X3X2 or X2X3 or X3X2 or X3X3 or X2X2
  MISC_FEATURE (14)..(14): X is M or Nle (Norleucine)
  MISC_FEATURE (15)..(15): X is A and G
  MISC_FEATURE (16)..(16): X is K, R or H for basic amino acids
  MISC_FEATURE (17)..(17): X is I, L or V
  MISC_FEATURE (18)..(18): X is I, L or V
  MISC_FEATURE (19)..(19): X is I, L or V
  MISC_FEATURE (20)..(20): X is D and E for acidic amino acids
XXXXXXXXXXXXXXXXXXXX

SEQ ID NO: 721 - protein, 20 aa, Artificial
  Completely synthesized peptide construct
  MISC_FEATURE (1)..(1): X is acetyl or propionyl group, D glycine or D alanine, cyclohexylalanine at amino terminus
  MISC_FEATURE (2)..(2): X is A and G
  MISC_FEATURE (3)..(3): X is F or P
  MISC_FEATURE (4)..(4): X is T or S
  MISC_FEATURE (5)..(5): X is K, R or H for basic amino acids
  MISC_FEATURE (6)..(6): X is I, L or V
  MISC_FEATURE (7)..(7): X is K, R or H for basic amino acids
  MISC_FEATURE (8)..(8): X is N or Q for amidated amino acids
  MISC_FEATURE (9)..(9): X is F or P
  MISC_FEATURE (10)..(10): X is T or S
  MISC_FEATURE (11)..(11): X is I, L or V
  MISC_FEATURE (12)..(12): X is I, L or V
  MISC_FEATURE (13)..(13): X is I, L or V
  MISC_FEATURE (14)..(14): X is D and E for acidic amino acids
  MISC_FEATURE (15)..(15): X is M or Nle (Norleucine)
  MISC_FEATURE (16)..(16): X is A and G
  MISC_FEATURE (17)..(17): X is K, R or H for basic amino acids
  MISC_FEATURE (18)..(18): X is I, L or V
  MISC_FEATURE (18)..(18): X is GabaX for X2X3 or X3X2 or X2X3 or X3X2 or X3X3 or X2X2
  MISC_FEATURE (19)..(19): X is I, L or V
  MISC_FEATURE (20)..(20): X is D and E for acidic amino acids
XXXXXXXXXXXXXXXXXXXX

SEQ ID NO: 722 - protein, 20 aa, Artificial
  Completely synthesized peptide construct
  MISC_FEATURE (1)..(1): X is acetyl or propionyl group, D glycine or D alanine, cyclohexylalanine at amino terminus
  MISC_FEATURE (2)..(2): X is A and G
  MISC_FEATURE (3)..(3): X is F or P
  MISC_FEATURE (4)..(4): X is T or S
  MISC_FEATURE (5)..(5): X is K, R or H for basic amino acids
  MISC_FEATURE (6)..(6): X is I, L or V
  MISC_FEATURE (7)..(7): X is F, W or Y for aromatic amino acids
  MISC_FEATURE (8)..(8): X is N or Q for amidated amino acids
  MISC_FEATURE (9)..(9): X is F or P
  MISC_FEATURE (10)..(10): X is T or S
  MISC_FEATURE (11)..(11): X is I, L or V
  MISC_FEATURE (12)..(12): X is I, L or V
  MISC_FEATURE (13)..(13): X is I, L or V
  MISC_FEATURE (14)..(14): X is D and E for acidic amino acids
  MISC_FEATURE (15)..(15): X is M or Nle (Norleucine)
  MISC_FEATURE (16)..(16): X is A and G
  MISC_FEATURE (17)..(17): X is K, R or H for basic amino acids
  MISC_FEATURE (18)..(18): X is I, L or V
  MISC_FEATURE (19)..(19): X is GabaX for X2X3 or X3X2 or X2X3 or X3X2 or X3X3 or X2X2
  MISC_FEATURE (20)..(20): X is D and E for acidic amino acids
XXXXXXXXXXXXXXXXXXXX

SEQ ID NO: 723 - protein, 20 aa, Artificial
  Completely synthesized peptide construct
  MISC_FEATURE (1)..(1): X is acetyl or propionyl group, D glycine or D alanine, cyclohexylalanine at amino terminus
  MISC_FEATURE (2)..(2): X is A and G
  MISC_FEATURE (3)..(3): X is F or P
  MISC_FEATURE (4)..(4): X is T or S
  MISC_FEATURE (5)..(5): X is K, R or H for basic amino acids
  MISC_FEATURE (6)..(6): X is I, L or V
  MISC_FEATURE (7)..(7): X is F, W or Y for aromatic amino acids
  MISC_FEATURE (8)..(8): X is N or Q for amidated amino acids
  MISC_FEATURE (9)..(9): X is F or P
  MISC_FEATURE (10)..(10): X is T or S
  MISC_FEATURE (11)..(11): X is I, L or V
  MISC_FEATURE (12)..(12): X is I, L or V
  MISC_FEATURE (13)..(13): X is I, L or V
  MISC_FEATURE (14)..(14): X is D and E for acidic amino acids
  MISC_FEATURE (15)..(15): X is M or Nle (Norleucine)
  MISC_FEATURE (16)..(16): X is A and G
  MISC_FEATURE (17)..(17): X is K, R or H for basic amino acids
  MISC_FEATURE (18)..(18): X is I, L or V
  MISC_FEATURE (19)..(19): X is I, L or V
  MISC_FEATURE (20)..(20): X is GabaX for X2X3 or X3X2 or X2X3 or X3X2 or X3X3 or X2X2
XXXXXXXXXXXXXXXXXXXX

SEQ ID NO: 724 - protein, 19 aa, Artificial
  Completely synthesized peptide construct
  MISC_FEATURE (1)..(1): X is acetyl or propionyl group, D glycine or D alanine, cyclohexylalanine at amino terminus
  MISC_FEATURE (2)..(2): X is A and G
  MISC_FEATURE (3)..(3): X is F or P
  MISC_FEATURE (4)..(4): X is T or S
  MISC_FEATURE (5)..(5): X is K, R or H for basic amino acids
  MISC_FEATURE (6)..(6): X is I, L or V
  MISC_FEATURE (7)..(7): X is F, W or Y for aromatic amino acids
  MISC_FEATURE (8)..(8): X is N or Q for amidated amino acids
  MISC_FEATURE (9)..(9): X is F or P
  MISC_FEATURE (10)..(10): X is T or S
  MISC_FEATURE (11)..(11): X is I, L or V
  MISC_FEATURE (12)..(12): X is I, L or V
  MISC_FEATURE (13)..(13): X is I, L or V
  MISC_FEATURE (14)..(14): X is D and E for acidic amino acids
  MISC_FEATURE (15)..(15): X is M or Nle (Norleucine)
  MISC_FEATURE (16)..(16): X is A and G
  MISC_FEATURE (17)..(17): X is K, R or H for basic amino acids
  MISC_FEATURE (18)..(18): X is I, L or V
  MISC_FEATURE (19)..(19): X is 5-aminopentanoic acid for replacement of 3 or 4 amino acids of X2 and X3
XXXXXXXXXXXXXXXXXXX

SEQ ID NO: 725 - protein, 19 aa, Artificial
  Completely synthesized peptide construct
  MISC_FEATURE (1)..(1): X is acetyl or propionyl group, D glycine or D alanine, cyclohexylalanine at amino terminus
  MISC_FEATURE (2)..(2): X is A and G
  MISC_FEATURE (3)..(3): X is F or P
  MISC_FEATURE (4)..(4): X is T or S
  MISC_FEATURE (5)..(5): X is K, R or H for basic amino acids
  MISC_FEATURE (6)..(6): X is I, L or V
  MISC_FEATURE (7)..(7): X is F, W or Y for aromatic amino acids
  MISC_FEATURE (8)..(8): X is N or Q for amidated amino acids
  MISC_FEATURE (9)..(9): X is F or P
  MISC_FEATURE (10)..(10): X is T or S
  MISC_FEATURE (11)..(11): X is I, L or V
  MISC_FEATURE (12)..(12): X is I, L or V
  MISC_FEATURE (13)..(13): X is I, L or V
  MISC_FEATURE (14)..(14): X is D and E for acidic amino acids
  MISC_FEATURE (15)..(15): X is M or Nle (Norleucine)
  MISC_FEATURE (16)..(16): X is A and G
  MISC_FEATURE (17)..(17): X is K, R or H for basic amino acids
  MISC_FEATURE (18)..(18): X is 5-aminopentanoic acid for replacement of 3 or 4 amino acids of X2 and X3
  MISC_FEATURE (19)..(19): X is D and E for acidic amino acids
XXXXXXXXXXXXXXXXXXX

SEQ ID NO: 726 - protein, 19 aa, Artificial
  Completely synthesized peptide construct
  MISC_FEATURE (1)..(1): X is acetyl or propionyl group, D glycine and D alanine, cyclohexylalanine at amino terminus
  MISC_FEATURE (2)..(2): X is A and G
  MISC_FEATURE (3)..(3): X is F or P
  MISC_FEATURE (4)..(4): X is T or S
  MISC_FEATURE (5)..(5): X is K, R or H for basic amino acids
  MISC_FEATURE (6)..(6): X is I, L or V
  MISC_FEATURE (7)..(7): X is F, W or Y for aromatic amino acids
  MISC_FEATURE (8)..(8): X is N or Q for amidated amino acids
  MISC_FEATURE (9)..(9): X is F or P
  MISC_FEATURE (10)..(10): X is T or S
  MISC_FEATURE (11)..(11): X is 5-aminopentanoic acid for replacement of 3 or 4 amino acids of X2 and X3
  MISC_FEATURE (12)..(12): X is D and E for acidic amino acids
  MISC_FEATURE (13)..(13): X is M or Nle (Norleucine)
  MISC_FEATURE (14)..(14): X is A and G
  MISC_FEATURE (15)..(15): X is K, R or H for basic amino acids
  MISC_FEATURE (16)..(16): X is I, L or V
  MISC_FEATURE (17)..(17): X is I, L or V
  MISC_FEATURE (18)..(18): X is I, L or V
  MISC_FEATURE (19)..(19): X is D and E for acidic amino acids
XXXXXXXXXXXXXXXXXXX

SEQ ID NO: 727 - protein, 18 aa, Artificial
  Completely synthesized peptide construct
  MISC_FEATURE (1)..(1): X is acetyl or propionyl group, D glycine or D alanine, cyclohexylalanine at amino terminus
  MISC_FEATURE (2)..(2): X is A and G
  MISC_FEATURE (3)..(3): X is F or P
  MISC_FEATURE (4)..(4): X is T or S
  MISC_FEATURE (5)..(5): X is K, R or H for basic amino acids
  MISC_FEATURE (6)..(6): X is I, L or V
  MISC_FEATURE (7)..(7): X is F, W or Y for aromatic amino acids
  MISC_FEATURE (8)..(8): X is N or Q for amidated amino acids
  MISC_FEATURE (9)..(9): X is F or P
  MISC_FEATURE (10)..(10): X is T or S
  MISC_FEATURE (11)..(11): X is 5-aminopentanoic acid for replacement of 3 or 4 amino acids of X2 and X3
  MISC_FEATURE (12)..(12): X is M or Nle (Norleucine)
  MISC_FEATURE (13)..(13): X is A and G
  MISC_FEATURE (14)..(14): X is K, R or H for basic amino acids
  MISC_FEATURE (15)..(15): X is I, L or V
  MISC_FEATURE (16)..(16): X is I, L or V
  MISC_FEATURE (17)..(17): X is I, L or V
  MISC_FEATURE (18)..(18): X is D and E for acidic amino acids
XXXXXXXXXXXXXXXXXX

SEQ ID NO: 728 - protein, 19 aa, Artificial
  Completely synthesized peptide construct
  MISC_FEATURE (1)..(1): X is acetyl or propionyl group, D glycine or D alanine, cyclohexylalanine at amino terminus
  MISC_FEATURE (2)..(2): X is A and G
  MISC_FEATURE (3)..(3): X is F or P
  MISC_FEATURE (4)..(4): X is T or S
  MISC_FEATURE (5)..(5): X is K, R or H for basic amino acids
  MISC_FEATURE (6)..(6): X is I, L or V
  MISC_FEATURE (7)..(7): X is F, W or Y for aromatic amino acids
  MISC_FEATURE (8)..(8): X is N or Q for amidated amino acids
  MISC_FEATURE (9)..(9): X is F or P
  MISC_FEATURE (10)..(10): X is T or S
  MISC_FEATURE (11)..(11): X is I, L or V
  MISC_FEATURE (12)..(12): X is 5-aminopentanoic acid for replacement of 3 or 4 amino acids of X2 and X3
  MISC_FEATURE (13)..(13): X is M or Nle (Norleucine)
  MISC_FEATURE (14)..(14): X is A and G
  MISC_FEATURE (15)..(15): X is K, R or H for basic amino acids
  MISC_FEATURE (16)..(16): X is I, L or V
  MISC_FEATURE (17)..(17): X is I, L or V
  MISC_FEATURE (18)..(18): X is I, L or V
  MISC_FEATURE (19)..(19): X is D and E for acidic amino acids
XXXXXXXXXXXXXXXXXXX

SEQ ID NO: 729 - protein, 20 aa, Artificial
  Completely synthesized peptide construct
  MISC_FEATURE (1)..(1): X is acetyl or propionyl group, D glycine or D alanine, cyclohexylalanine at amino terminus
  MISC_FEATURE (2)..(2): X is A and G
  MISC_FEATURE (3)..(3): X is F or P
  MISC_FEATURE (4)..(4): X is T or S
  MISC_FEATURE (5)..(5): X is K, R or H for basic amino acids
  MISC_FEATURE (6)..(6): X is I, L or V
  MISC_FEATURE (7)..(7): X is F, W or Y for aromatic amino acids
  MISC_FEATURE (8)..(8): X is N or Q for amidated amino acids
  MISC_FEATURE (9)..(9): X is F or P
  MISC_FEATURE (10)..(10): X is T or S
  MISC_FEATURE (11)..(11): X is GabaX for X2X3 or X3X2 or X2X3 or X3X2 or X3X3 or X2X2
  MISC_FEATURE (12)..(12): X is I, L or V
  MISC_FEATURE (13)..(13): X is D and E for acidic amino acids
  MISC_FEATURE (14)..(14): X is M or Nle (Norleucine)
  MISC_FEATURE (15)..(15): X is A and G
  MISC_FEATURE (16)..(16): X is K, R or H for basic amino acids
  MISC_FEATURE (17)..(17): X is I, L or V
  MISC_FEATURE (18)..(18): X is I, L or V
  MISC_FEATURE (19)..(19): X is I, L or V
  MISC_FEATURE (20)..(20): X is D and E for acidic amino acids
XXXXXXXXXXXXXXXXXXXX

SEQ ID NO: 730 - protein, 20 aa, Artificial
  Completely synthesized peptide construct
  MISC_FEATURE (1)..(1): X is acetyl or propionyl group, D glycine or D alanine, cyclohexylalanine at amino terminus
  MISC_FEATURE (2)..(2): X is A and G
  MISC_FEATURE (3)..(3): X is F or P
  MISC_FEATURE (4)..(4): X is T or S
  MISC_FEATURE (5)..(5): X is K, R or H for basic amino acids
  MISC_FEATURE (6)..(6): X is I, L or V
  MISC_FEATURE (7)..(7): X is F, W or Y for aromatic amino acids
  MISC_FEATURE (8)..(8): X is N or Q for amidated amino acids
  MISC_FEATURE (9)..(9): X is F or P
  MISC_FEATURE (10)..(10): X is T or S
  MISC_FEATURE (11)..(11): X is I, L or V
  MISC_FEATURE (12)..(12): X is GabaX for X2X3 or X3X2 or X2X3 or X3X2 or X3X3 or X2X2
  MISC_FEATURE (13)..(13): X is D and E for acidic amino acids
  MISC_FEATURE (14)..(14): X is M or Nle (Norleucine)
  MISC_FEATURE (15)..(15): X is A and G
  MISC_FEATURE (16)..(16): X is K, R or H for basic amino acids
  MISC_FEATURE (17)..(17): X is I, L or V
  MISC_FEATURE (18)..(18): X is I, L or V
  MISC_FEATURE (19)..(19): X is I, L or V
  MISC_FEATURE (20)..(20): X is D and E for acidic amino acids
XXXXXXXXXXXXXXXXXXXX

SEQ ID NO: 731 - protein, 20 aa, Artificial
  Completely synthesized peptide construct
  MISC_FEATURE (1)..(1): X is acetyl or propionyl group, D glycine or D alanine, cyclohexylalanine at amino terminus
  MISC_FEATURE (2)..(2): X is A and G
  MISC_FEATURE (3)..(3): X is F or P
  MISC_FEATURE (4)..(4): X is T or S
  MISC_FEATURE (5)..(5): X is K, R or H for basic amino acids
  MISC_FEATURE (6)..(6): X is I, L or V
  MISC_FEATURE (7)..(7): X is F, W or Y for aromatic amino acids
  MISC_FEATURE (8)..(8): X is N or Q for amidated amino acids
  MISC_FEATURE (9)..(9): X is F or P
  MISC_FEATURE (10)..(10): X is T or S
  MISC_FEATURE (11)..(11): X is I, L or V
  MISC_FEATURE (12)..(12): X is I, L or V
  MISC_FEATURE (13)..(13): X is GabaX for X2X3 or X3X2 or X2X3 or X3X2 or X3X3 or X2X2
  MISC_FEATURE (14)..(14): X is M or Nle (Norleucine)
  MISC_FEATURE (15)..(15): X is A and G
  MISC_FEATURE (16)..(16): X is K, R or H for basic amino acids
  MISC_FEATURE (17)..(17): X is I, L or V
  MISC_FEATURE (18)..(18): X is I, L or V
  MISC_FEATURE (19)..(19): X is I, L or V
  MISC_FEATURE (20)..(20): X is D and E for acidic amino acids
XXXXXXXXXXXXXXXXXXXX

SEQ ID NO: 732 - protein, 20 aa, Artificial
  Completely synthesized peptide construct
  MISC_FEATURE (1)..(1): X is acetyl or propionyl group, D glycine or D alanine, cyclohexylalanine at amino terminus
  MISC_FEATURE (2)..(2): X is A and G
  MISC_FEATURE (3)..(3): X is F or P
  MISC_FEATURE (4)..(4): X is T or S
  MISC_FEATURE (5)..(5): X is K, R or H for basic amino acids
  MISC_FEATURE (6)..(6): X is I, L or V
  MISC_FEATURE (7)..(7): X is F, W or Y for aromatic amino acids
  MISC_FEATURE (8)..(8): X is N or Q for amidated amino acids
  MISC_FEATURE (9)..(9): X is F or P
  MISC_FEATURE (10)..(10): X is T or S
  MISC_FEATURE (11)..(11): X is I, L or V
  MISC_FEATURE (12)..(12): X is I, L or V
  MISC_FEATURE (13)..(13): X is I, L or V
  MISC_FEATURE (14)..(14): X is D and E for acidic amino acids
  MISC_FEATURE (15)..(15): X is M or Nle (Norleucine)
  MISC_FEATURE (16)..(16): X is A and G
  MISC_FEATURE (17)..(17): X is K, R or H for basic amino acids
  MISC_FEATURE (18)..(18): X is GabaX for X2X3 or X3X2 or X2X3 or X3X2 or X3X3 or X2X2
  MISC_FEATURE (19)..(19): X is I, L or V
  MISC_FEATURE (20)..(20): X is D and E for acidic amino acids
XXXXXXXXXXXXXXXXXXXX

SEQ ID NO: 733 - protein, 20 aa, Artificial
  Completely synthesized peptide construct
  MISC_FEATURE (1)..(1): X is acetyl or propionyl group, D glycine or D alanine, cyclohexylalanine at amino terminus
  MISC_FEATURE (2)..(2): X is A and G
  MISC_FEATURE (3)..(3): X is F or P
  MISC_FEATURE (4)..(4): X is T or S
  MISC_FEATURE (5)..(5): X is K, R or H for basic amino acids
  MISC_FEATURE (6)..(6): X is I, L or V
  MISC_FEATURE (7)..(7): X is F, W or Y for aromatic amino acids
  MISC_FEATURE (8)..(8): X is N or Q for amidated amino acids
  MISC_FEATURE (9)..(9): X is F or P
  MISC_FEATURE (10)..(10): X is T or S
  MISC_FEATURE (11)..(11): X is I, L or V
  MISC_FEATURE (12)..(12): X is I, L or V
  MISC_FEATURE (13)..(13): X is I, L or V
  MISC_FEATURE (14)..(14): X is D and E for acidic amino acids
  MISC_FEATURE (15)..(15): X is M or Nle (Norleucine)
  MISC_FEATURE (16)..(16): X is A and G
  MISC_FEATURE (17)..(17): X is K, R or H for basic amino acids
  MISC_FEATURE (18)..(18): X is I, L or V
  MISC_FEATURE (19)..(19): X is GabaX for X2X3 or X3X2 or X2X3 or X3X2 or X3X3 or X2X2
  MISC_FEATURE (20)..(20): X is D and E for acidic amino acids
XXXXXXXXXXXXXXXXXXXX

SEQ ID NO: 734 - protein, 20 aa, Artificial
  Completely synthesized peptide construct
  MISC_FEATURE (1)..(1): X is acetyl or propionyl group, D glycine or D alanine, cyclohexylalanine at amino terminus
  MISC_FEATURE (2)..(2): X is A and G
  MISC_FEATURE (3)..(3): X is F or P
  MISC_FEATURE (4)..(4): X is T or S
  MISC_FEATURE (5)..(5): X is K, R or H for basic amino acids
  MISC_FEATURE (6)..(6): X is I, L or V
  MISC_FEATURE (7)..(7): X is F, W or Y for aromatic amino acids
  MISC_FEATURE (8)..(8): X is N or Q for amidated amino acids
  MISC_FEATURE (9)..(9): X is F or P
  MISC_FEATURE (10)..(10): X is T or S
  MISC_FEATURE (11)..(11): X is I, L or V
  MISC_FEATURE (12)..(12): X is I, L or V
  MISC_FEATURE (13)..(13): X is I, L or V
  MISC_FEATURE (14)..(14): X is D and E for acidic amino acids
  MISC_FEATURE (15)..(15): X is M or Nle (Norleucine)
  MISC_FEATURE (16)..(16): X is A and G
  MISC_FEATURE (17)..(17): X is K, R or H for basic amino acids
  MISC_FEATURE (18)..(18): X is I, L or V
  MISC_FEATURE (19)..(19): X is I, L or V
  MISC_FEATURE (20)..(20): X is GabaX for X2X3 or X3X2 or X2X3 or X3X2 or X3X3 or X2X2
XXXXXXXXXXXXXXXXXXXX

SEQ ID NO: 735 - protein, 21 aa, Artificial
  Completely synthesized peptide construct
  MISC_FEATURE (1)..(1): X is acetyl or propionyl group, D glycine or D alanine, cyclohexylalanine at amino terminus
  MISC_FEATURE (2)..(2): X is A and G
  MISC_FEATURE (3)..(3): X is F or P
  MISC_FEATURE (4)..(4): X is T or S
  MISC_FEATURE (5)..(5): X is K, R or H for basic amino acids
  MISC_FEATURE (6)..(6): X is I, L or V
  MISC_FEATURE (7)..(7): X is F, W or Y for aromatic amino acids
  MISC_FEATURE (8)..(8): X is N or Q for amidated amino acids
  MISC_FEATURE (9)..(9): X is F or P
  MISC_FEATURE (10)..(10): X is T or S
  MISC_FEATURE (11)..(11): X is I, L or V
  MISC_FEATURE (12)..(12): X is I, L or V
  MISC_FEATURE (13)..(13): X is I, L or V
  MISC_FEATURE (14)..(14): X is D and E for acidic amino acids
  MISC_FEATURE (15)..(15): X is M or Nle (Norleucine)
  MISC_FEATURE (16)..(16): X is A and G
  MISC_FEATURE (17)..(17): X is K, R or H for basic amino acids
  MISC_FEATURE (18)..(18): X is I, L or V
  MISC_FEATURE (19)..(19): X is I, L or V
  MISC_FEATURE (20)..(20): X is I, L or V
  MISC_FEATURE (21)..(21): X is D and E for acidic amino acids
XXXXXXXXXXXXXXXXXXXXX

SEQ ID NO: 736 - protein, 20 aa, Artificial
  Completely synthesized peptide construct
  MISC_FEATURE (1)..(1): X is acetyl or propionyl group, D glycine or D alanine, cyclohexylalanine at amino terminus
  MISC_FEATURE (2)..(2): X is A and G
  MISC_FEATURE (3)..(3): X is F or P
  MISC_FEATURE (4)..(4): X is T or S
  MISC_FEATURE (5)..(5): X is K, R or H for basic amino acids
  MISC_FEATURE (6)..(6): X is I, L or V
  MISC_FEATURE (7)..(7): X is F, W or Y for aromatic amino acids
  MISC_FEATURE (8)..(8): X is N or Q for amidated amino acids
  MISC_FEATURE (9)..(9): X is F or P
  MISC_FEATURE (10)..(10): X is T or S
  MISC_FEATURE (11)..(11): X is GabaX for X2X3 or X3X2 or X2X3 or X3X2 or X3X3 or X2X2
  MISC_FEATURE (12)..(12): X is I, L or V
  MISC_FEATURE (13)..(13): X is D and E for acidic amino acids
  MISC_FEATURE (14)..(14): X is M or Nle (Norleucine)
  MISC_FEATURE (15)..(15): X is A and G
  MISC_FEATURE (16)..(16): X is K, R or H for basic amino acids
  MISC_FEATURE (17)..(17): X is I, L or V
  MISC_FEATURE (18)..(18): X is I, L or V
  MISC_FEATURE (19)..(19): X is I, L or V
  MISC_FEATURE (20)..(20): X is D and E for acidic amino acids
XXXXXXXXXXXXXXXXXXXX

SEQ ID NO: 737 - protein, 20 aa, Artificial
  Completely synthesized peptide construct
  MISC_FEATURE (1)..(1): X is acetyl or propionyl group, D glycine or D alanine, cyclohexylalanine at amino terminus
  MISC_FEATURE (2)..(2): X is A and G
  MISC_FEATURE (3)..(3): X is F or P
  MISC_FEATURE (4)..(4): X is T or S
  MISC_FEATURE (5)..(5): X is K, R or H for basic amino acids
  MISC_FEATURE (6)..(6): X is I, L or V
  MISC_FEATURE (7)..(7): X is F, W or Y for aromatic amino acids
  MISC_FEATURE (8)..(8): X is N or Q for amidated amino acids
  MISC_FEATURE (9)..(9): X is F or P
  MISC_FEATURE (10)..(10): X is T or S
  MISC_FEATURE (11)..(11): X is I, L or V
  MISC_FEATURE (12)..(12): X is GabaX for X2X3 or X3X2 or X2X3 or X3X2 or X3X3 or X2X2
  MISC_FEATURE (13)..(13): X is D and E for acidic amino acids
  MISC_FEATURE (14)..(14): X is M or Nle (Norleucine)
  MISC_FEATURE (15)..(15): X is A and G
  MISC_FEATURE (16)..(16): X is A and G
  MISC_FEATURE (17)..(17): X is I, L or V
  MISC_FEATURE (18)..(18): X is I, L or V
  MISC_FEATURE (19)..(19): X is I, L or V
  MISC_FEATURE (20)..(20): X is D and E for acidic amino acids
XXXXXXXXXXXXXXXXXXXX

SEQ ID NO: 738 - protein, 20 aa, Artificial
  Completely synthesized peptide construct
  MISC_FEATURE (1)..(1): X is acetyl or propionyl group, D glycine or D alanine, cyclohexylalanine at amino terminus
  MISC_FEATURE (2)..(2): X is A and G
  MISC_FEATURE (3)..(3): X is F or P
  MISC_FEATURE (4)..(4): X is T or S
  MISC_FEATURE (5)..(5): X is K, R or H for basic amino acids
  MISC_FEATURE (6)..(6): X is I, L or V
  MISC_FEATURE (7)..(7): X is F, W or Y for aromatic amino acids
  MISC_FEATURE (8)..(8): X is N or Q for amidated amino acids
  MISC_FEATURE (9)..(9): X is F or P
  MISC_FEATURE (10)..(10): X is T or S
  MISC_FEATURE (11)..(11): X is I, L or V
  MISC_FEATURE (12)..(12): X is I, L or V
  MISC_FEATURE (13)..(13): X is GabaX for X2X3 or X3X2 or X2X3 or X3X2 or X3X3 or X2X2
  MISC_FEATURE (14)..(14): X is M or Nle (Norleucine)
  MISC_FEATURE (15)..(15): X is A and G
  MISC_FEATURE (16)..(16): X is K, R or H for basic amino acids
  MISC_FEATURE (17)..(17): X is I, L or V
  MISC_FEATURE (18)..(18): X is I, L or V
  MISC_FEATURE (19)..(19): X is I, L or V
  MISC_FEATURE (20)..(20): X is D and E for acidic amino acids
XXXXXXXXXXXXXXXXXXXX

SEQ ID NO: 739 - protein, 20 aa, Artificial
  Completely synthesized peptide construct
  MISC_FEATURE (1)..(1): X is acetyl or propionyl group, D glycine or D alanine, cyclohexylalanine at amino terminus
  MISC_FEATURE (2)..(2): X is A and G
  MISC_FEATURE (3)..(3): X is F or P
  MISC_FEATURE (4)..(4): X is T or S
  MISC_FEATURE (5)..(5): X is K, R or H for basic amino acids
  MISC_FEATURE (6)..(6): X is I, L or V
  MISC_FEATURE (7)..(7): X is X is F, W or Y for aromatic amino acids
  MISC_FEATURE (8)..(8): X is N or Q for amidated amino acids
  MISC_FEATURE (9)..(9): X is F or P
  MISC_FEATURE (10)..(10): X is T or S
  MISC_FEATURE (11)..(11): X is I, L or V
  MISC_FEATURE (12)..(12): X is I, L or V
  MISC_FEATURE (13)..(13): X is I, L or V
  MISC_FEATURE (14)..(14): X is D and E for acidic amino acids
  MISC_FEATURE (15)..(15): X is M or Nle (Norleucine)
  MISC_FEATURE (16)..(16): X is A and G
  MISC_FEATURE (17)..(17): X is K, R or H for basic amino acids
  MISC_FEATURE (18)..(18): X is GabaX for X2X3 or X3X2 or X2X3 or X3X2 or X3X3 or X2X2
  MISC_FEATURE (19)..(19): X is I, L or V
  MISC_FEATURE (20)..(20): X is D and E for acidic amino acids
XXXXXXXXXXXXXXXXXXXX

SEQ ID NO: 740 - protein, 20 aa, Artificial
  Completely synthesized peptide construct
  MISC_FEATURE (1)..(1): X is acetyl or propionyl group, D glycine or D alanine, cyclohexylalanine at amino terminus
  MISC_FEATURE (2)..(2): X is A and G
  MISC_FEATURE (3)..(3): X is F or P
  MISC_FEATURE (4)..(4): X is T or S
  MISC_FEATURE (5)..(5): X is K, R or H for basic amino acids
  MISC_FEATURE (6)..(6): X is I, L or V
  MISC_FEATURE (7)..(7): X is F, W or Y for aromatic amino acids
  MISC_FEATURE (8)..(8): X is N or Q for amidated amino acids
  MISC_FEATURE (9)..(9): X is F or P
  MISC_FEATURE (10)..(10): X is T or S
  MISC_FEATURE (11)..(11): X is I, L or V
  MISC_FEATURE (12)..(12): X is I, L or V
  MISC_FEATURE (13)..(13): X is I, L or V
  MISC_FEATURE (14)..(14): X is D and E for acidic amino acids
  MISC_FEATURE (15)..(15): X is M or Nle (Norleucine)
  MISC_FEATURE (16)..(16): X is A and G
  MISC_FEATURE (17)..(17): X is K, R or H for basic amino acids
  MISC_FEATURE (18)..(18): X is I, L or V
  MISC_FEATURE (19)..(19): X is GabaX for X2X3 or X3X2 or X2X3 or X3X2 or X3X3 or X2X2
  MISC_FEATURE (20)..(20): X is D and E for acidic amino acids
XXXXXXXXXXXXXXXXXXXX

SEQ ID NO: 741 - protein, 20 aa, Artificial
  Completely synthesized peptide construct
  MISC_FEATURE (1)..(1): X is acetyl or propionyl group, D glycine or D alanine, cyclohexylalanine at amino terminus
  MISC_FEATURE (2)..(2): X is A and G
  MISC_FEATURE (3)..(3): X is F or P
  MISC_FEATURE (4)..(4): X is T or S
  MISC_FEATURE (5)..(5): X is K, R or H for basic amino acids
  MISC_FEATURE (6)..(6): X is I, L or V
  MISC_FEATURE (7)..(7): X is F, W or Y for aromatic amino acids
  MISC_FEATURE (8)..(8): X is N or Q for amidated amino acids
  MISC_FEATURE (9)..(9): X is F or P
  MISC_FEATURE (10)..(10): X is T or S
  MISC_FEATURE (11)..(11): X is I, L or V
  MISC_FEATURE (12)..(12): X is I, L or V
  MISC_FEATURE (13)..(13): X is I, L or V
  MISC_FEATURE (14)..(14): X is D and E for acidic amino acids
  MISC_FEATURE (15)..(15): X is M or Nle (Norleucine)
  MISC_FEATURE (16)..(16): X is A and G
  MISC_FEATURE (17)..(17): X is K, R or H for basic amino acids
  MISC_FEATURE (18)..(18): X is I, L or V
  MISC_FEATURE (19)..(19): X is I, L or V
  MISC_FEATURE (20)..(20): X is GabaX for X2X3 or X3X2 or X2X3 or X3X2 or X3X3 or X2X2
XXXXXXXXXXXXXXXXXXXX

SEQ ID NO: 742 - protein, 19 aa, Artificial
  Completely synthesized peptide construct
  MISC_FEATURE (1)..(1): X is acetyl or propionyl group, D glycine or D alanine, cyclohexylalanine at amino terminus
  MISC_FEATURE (2)..(2): X is A and G
  MISC_FEATURE (3)..(3): X is F or P
  MISC_FEATURE (4)..(4): X is T or S
  MISC_FEATURE (5)..(5): X is K, R or H for basic amino acids
  MISC_FEATURE (6)..(6): X is I, L or V
  MISC_FEATURE (7)..(7): X is F, W or Y for aromatic amino acids
  MISC_FEATURE (8)..(8): X is N or Q for amidated amino acids
  MISC_FEATURE (9)..(9): X is F or P
  MISC_FEATURE (10)..(10): X is T or S
  MISC_FEATURE (11)..(11): X is I, L or V
  MISC_FEATURE (12)..(12): X is I, L or V
  MISC_FEATURE (13)..(13): X is I, L or V
  MISC_FEATURE (14)..(14): X is D and E for acidic amino acids
  MISC_FEATURE (15)..(15): X is M or Nle (Norleucine)
  MISC_FEATURE (16)..(16): X is A and G
  MISC_FEATURE (17)..(17): X is K, R or H for basic amino acids
  MISC_FEATURE (18)..(18): X is I, L or V
  MISC_FEATURE (19)..(19): X is 5-aminopentanoic acid for replacement of 3 or 4 amino acids of X2 and X3
XXXXXXXXXXXXXXXXXXX

SEQ ID NO: 743 - protein, 19 aa, Artificial
  Completely synthesized peptide construct
  MISC_FEATURE (1)..(1): X is acetyl or propionyl group, D glycine or D alanine, cyclohexylalanine at amino terminus
  MISC_FEATURE (2)..(2): X is A and G
  MISC_FEATURE (3)..(3): X is F or P
  MISC_FEATURE (4)..(4): X is T or S
  MISC_FEATURE (5)..(5): X is K, R or H for basic amino acids
  MISC_FEATURE (6)..(6): X is I, L or V
  MISC_FEATURE (7)..(7): X is F, W or Y for aromatic amino acids
  MISC_FEATURE (8)..(8): X is N or Q for amidated amino acids
  MISC_FEATURE (9)..(9): X is F or P
  MISC_FEATURE (10)..(10): X is T or S
  MISC_FEATURE (11)..(11): X is I, L or V
  MISC_FEATURE (12)..(12): X is I, L or V
  MISC_FEATURE (13)..(13): X is I, L or V
  MISC_FEATURE (14)..(14): X is D and E for acidic amino acids
  MISC_FEATURE (15)..(15): X is M or Nle (Norleucine)
  MISC_FEATURE (16)..(16): X is A and G
  MISC_FEATURE (17)..(17): X is K, R or H for basic amino acids
  MISC_FEATURE (18)..(18): X is 5-aminopentanoic acid for replacement of 3 or 4 amino acids of X2 and X3
  MISC_FEATURE (19)..(19): X is D and E for acidic amino acids
XXXXXXXXXXXXXXXXXXX

SEQ ID NO: 744 - protein, 19 aa, Artificial
  Completely synthesized peptide construct
  MISC_FEATURE (1)..(1): X is acetyl or propionyl group, D glycine or D alanine, cyclohexylalanine at amino terminus
  MISC_FEATURE (2)..(2): X is A and G
  MISC_FEATURE (3)..(3): X is F or P
  MISC_FEATURE (4)..(4): X is T or S
  MISC_FEATURE (5)..(5): X is K, R or H for basic amino acids
  MISC_FEATURE (6)..(6): X is I, L or V
  MISC_FEATURE (7)..(7): X is F, W or Y for aromatic amino acids
  MISC_FEATURE (8)..(8): X is N or Q for amidated amino acids
  MISC_FEATURE (9)..(9): X is F or P
  MISC_FEATURE (10)..(10): X is T or S
  MISC_FEATURE (11)..(11): X is 5-aminopentanoic acid for replacement of 3 or 4 amino acids of X2 and X3
  MISC_FEATURE (12)..(12): X is D and E for acidic amino acids
  MISC_FEATURE (13)..(13): X is M or Nle (Norleucine)
  MISC_FEATURE (14)..(14): X is A and G
  MISC_FEATURE (15)..(15): X is K, R or H for basic amino acids
  MISC_FEATURE (16)..(16): X is I, L or V
  MISC_FEATURE (17)..(17): X is I, L or V
  MISC_FEATURE (18)..(18): X is I, L or V
  MISC_FEATURE (19)..(19): X is D and E for acidic amino acids
XXXXXXXXXXXXXXXXXXX

SEQ ID NO: 745 - protein, 18 aa, Artificial
  Completely synthesized peptide construct
  MISC_FEATURE (1)..(1): X is acetyl or propionyl group, D glycine or D alanine, cyclohexylalanine at amino terminus
  MISC_FEATURE (2)..(2): X is A and G
  MISC_FEATURE (3)..(3): X is F or P
  MISC_FEATURE (4)..(4): X is T or S
  MISC_FEATURE (5)..(5): X is K, R or H for basic amino acids
  MISC_FEATURE (6)..(6): X is I, L or V
  MISC_FEATURE (7)..(7): X is F, W or Y for aromatic amino acids
  MISC_FEATURE (8)..(8): X is N or Q for amidated amino acids
  MISC_FEATURE (9)..(9): X is F or P
  MISC_FEATURE (10)..(10): X is T or S
  MISC_FEATURE (11)..(11): X is 5-aminopentanoic acid for replacement of 3 or 4 amino acids of X2 and X3
  MISC_FEATURE (12)..(12): X is M or Nle (Norleucine)
  MISC_FEATURE (13)..(13): X is A and G
  MISC_FEATURE (14)..(14): X is K, R or H for basic amino acids
  MISC_FEATURE (15)..(15): X is I, L or V
  MISC_FEATURE (16)..(16): X is I, L or V
  MISC_FEATURE (17)..(17): X is I, L or V
  MISC_FEATURE (18)..(18): X is D and E for acidic amino acids
XXXXXXXXXXXXXXXXXX

SEQ ID NO: 746 - protein, 19 aa, Artificial
  Completely synthesized peptide construct
  MISC_FEATURE (1)..(1): X is acetyl or propionyl group, D glycine or D alanine, cyclohexylalanine at amino terminus
  MISC_FEATURE (2)..(2): X is A and G
  MISC_FEATURE (3)..(3): X is F or P
  MISC_FEATURE (4)..(4): X is T or S
  MISC_FEATURE (5)..(5): X is K, R or H for basic amino acids
  MISC_FEATURE (6)..(6): X is I, L or V
  MISC_FEATURE (7)..(7): X is F, W or Y for aromatic amino acids
  MISC_FEATURE (8)..(8): X is N or Q for amidated amino acids
  MISC_FEATURE (9)..(9): X is F or P
  MISC_FEATURE (10)..(10): X is T or S
  MISC_FEATURE (11)..(11): X is I, L or V
  MISC_FEATURE (12)..(12): X is 5-aminopentanoic acid for replacement of 3 or 4 amino acids of X2 and X3
  MISC_FEATURE (13)..(13): X is M or Nle (Norleucine)
  MISC_FEATURE (14)..(14): X is A and G
  MISC_FEATURE (15)..(15): X is K, R or H for basic amino acids
  MISC_FEATURE (16)..(16): X is I, L or V
  MISC_FEATURE (17)..(17): X is I, L or V
  MISC_FEATURE (18)..(18): X is I, L or V
  MISC_FEATURE (19)..(19): X is D and E for acidic amino acids
XXXXXXXXXXXXXXXXXXX

SEQ ID NO: 747 - protein, 20 aa, Artificial
  Completely synthesized peptide construct
  MISC_FEATURE (1)..(1): X is acetyl or propionyl group, D glycine or D alanine, cyclohexylalanine at amino terminus
  MISC_FEATURE (2)..(2): X is A and G
  MISC_FEATURE (3)..(3): X is F or P
  MISC_FEATURE (4)..(4): X is T or S
  MISC_FEATURE (5)..(5): X is K, R or H for basic amino acids
  MISC_FEATURE (6)..(6): X is I, L or V
  MISC_FEATURE (7)..(7): X is F, W or Y for aromatic amino acids
  MISC_FEATURE (8)..(8): X is N or Q for amidated amino acids
  MISC_FEATURE (9)..(9): X is F or P
  MISC_FEATURE (10)..(10): X is T or S
  MISC_FEATURE (11)..(11): X is GabaX for X2X3 or X3X2 or X2X3 or X3X2 or X3X3 or X2X2
  MISC_FEATURE (12)..(12): X is I, L or V
  MISC_FEATURE (13)..(13): X is D and E for acidic amino acids
  MISC_FEATURE (14)..(14): X is M or Nle (Norleucine)
  MISC_FEATURE (15)..(15): X is A and G
  MISC_FEATURE (16)..(16): X is K, R or H for basic amino acids
  MISC_FEATURE (17)..(17): X is I, L or V
  MISC_FEATURE (18)..(18): X is I, L or V
  MISC_FEATURE (19)..(19): X is I, L or V
  MISC_FEATURE (20)..(20): X is D and E for acidic amino acids
XXXXXXXXXXXXXXXXXXXX

SEQ ID NO: 748 - protein, 20 aa, Artificial
  Completely synthesized peptide construct
  MISC_FEATURE (1)..(1): X is acetyl or propionyl group, D glycine or D alanine, cyclohexylalanine at amino terminus
  MISC_FEATURE (2)..(2): X is A and G
  MISC_FEATURE (3)..(3): X is F or P
  MISC_FEATURE (4)..(4): X is T or S
  MISC_FEATURE (5)..(5): X is K, R or H for basic amino acids
  MISC_FEATURE (6)..(6): X is I, L or V
  MISC_FEATURE (7)..(7): X is F, W or Y for aromatic amino acids
  MISC_FEATURE (8)..(8): X is N or Q for amidated amino acids
  MISC_FEATURE (9)..(9): X is F or P
  MISC_FEATURE (10)..(10): X is T or S
  MISC_FEATURE (11)..(11): X is I, L or V
  MISC_FEATURE (12)..(12): X is GabaX for X2X3 or X3X2 or X2X3 or X3X2 or X3X3 or X2X2
  MISC_FEATURE (13)..(13): X is D and E for acidic amino acids
  MISC_FEATURE (14)..(14): X is M or Nle (Norleucine)
  MISC_FEATURE (15)..(15): X is A and G
  MISC_FEATURE (16)..(16): X is K, R or H for basic amino acids
  MISC_FEATURE (17)..(17): X is I, L or V
  MISC_FEATURE (18)..(18): X is I, L or V
  MISC_FEATURE (19)..(19): X is I, L or V
  MISC_FEATURE (20)..(20): X is D and E for acidic amino acids
XXXXXXXXXXXXXXXXXXXX

SEQ ID NO: 749 - protein, 20 aa, Artificial
  Completely synthesized peptide construct
  MISC_FEATURE (1)..(1): X is acetyl or propionyl group, D glycine or D alanine, cyclohexylalanine at amino terminus
  MISC_FEATURE (2)..(2): X is A and G
  MISC_FEATURE (3)..(3): X is F or P
  MISC_FEATURE (4)..(4): X is T or S
  MISC_FEATURE (5)..(5): X is K, R or H for basic amino acids
  MISC_FEATURE (6)..(6): X is I, L or V
  MISC_FEATURE (7)..(7): X is F, W or Y for aromatic amino acids
  MISC_FEATURE (8)..(8): X is N or Q for amidated amino acids
  MISC_FEATURE (9)..(9): X is F or P
  MISC_FEATURE (10)..(10): X is T or S
  MISC_FEATURE (11)..(11): X is I, L or V
  MISC_FEATURE (12)..(12): X is I, L or V
  MISC_FEATURE (13)..(13): X is GabaX for X2X3 or X3X2 or X2X3 or X3X2 or X3X3 or X2X2
  MISC_FEATURE (14)..(14): X is M or Nle (Norleucine)
  MISC_FEATURE (15)..(15): X is A and G
  MISC_FEATURE (16)..(16): X is K, R or H for basic amino acids
  MISC_FEATURE (17)..(17): X is I, L or V
  MISC_FEATURE (18)..(18): X is I, L or V
  MISC_FEATURE (19)..(19): X is I, L or V
  MISC_FEATURE (20)..(20): X is D and E for acidic amino acids
XXXXXXXXXXXXXXXXXXXX

SEQ ID NO: 750 - protein, 18 aa, Artificial
  Completely synthesized peptide construct
  MISC_FEATURE (1)..(1): X is acetyl or propionyl group, D glycine or D alanine, cyclohexylalanine at amino terminus
  MISC_FEATURE (2)..(2): X is A and G
  MISC_FEATURE (3)..(3): X is F or P
  MISC_FEATURE (4)..(4): X is T or S
  MISC_FEATURE (5)..(5): X is K, R or H for basic amino acids
  MISC_FEATURE (6)..(6): X is I, L or V
  MISC_FEATURE (7)..(7): X is F, W or Y for aromatic amino acids
  MISC_FEATURE (8)..(8): X is N or Q for amidated amino acids
  MISC_FEATURE (9)..(9): X is F or P
  MISC_FEATURE (10)..(10): X is T or S
  MISC_FEATURE (11)..(11): X is 5-aminopentanoic acid for replacement of 3 or 4 amino acids of X2 and X3
  MISC_FEATURE (12)..(12): X is D and E for acidic amino acids
  MISC_FEATURE (13)..(13): X is M or Nle (Norleucine)
  MISC_FEATURE (14)..(14): X is A and G
  MISC_FEATURE (15)..(15): X is K, R or H for basic amino acids
  MISC_FEATURE (16)..(16): X is GabaX for X2X3 or X3X2 or X2X3 or X3X2 or X3X3 or X2X2
  MISC_FEATURE (17)..(17): X is I, L or V
  MISC_FEATURE (18)..(18): X is D and E for acidic amino acids
XXXXXXXXXXXXXXXXXX

SEQ ID NO: 751 - protein, 16 aa, Artificial
  Completely synthesized peptide construct
  MISC_FEATURE (1)..(1): X is acetyl or propionyl group, D glycine or D alanine, cyclohexylalanine at amino terminus
  MISC_FEATURE (2)..(2): X is A and G
  MISC_FEATURE (3)..(3): X is F or P
  MISC_FEATURE (4)..(4): X is T or S
  MISC_FEATURE (5)..(5): X is K, R or H for basic amino acids
  MISC_FEATURE (6)..(6): X is I, L or V
  MISC_FEATURE (7)..(7): X is F, W or Y for aromatic amino acids
  MISC_FEATURE (8)..(8): X is N or Q for amidated amino acids
  MISC_FEATURE (9)..(9): X is F or P
  MISC_FEATURE (10)..(10): X is T or S
  MISC_FEATURE (11)..(11): X is 5-aminopentanoic acid for replacement of 3 or 4 amino acids of X2 and X3
  MISC_FEATURE (12)..(12): X is M or Nle (Norleucine)
  MISC_FEATURE (13)..(13): X is A and G
  MISC_FEATURE (14)..(14): X is K, R or H for basic amino acids
  MISC_FEATURE (15)..(15): X is 5-aminopentanoic acid for replacement of 3 or 4 amino acids of X2 and X3
  MISC_FEATURE (16)..(16): X is D and E for acidic amino acids
XXXXXXXXXXXXXXXX

SEQ ID NO: 752 - protein, 15 aa, Artificial
  Completely synthesized peptide construct
  MISC_FEATURE (1)..(1): X is acetyl or propionyl group, D glycine or D alanine, cyclohexylalanine at amino terminus
  MISC_FEATURE (2)..(2): X is A and G
  MISC_FEATURE (3)..(3): X is F or P
  MISC_FEATURE (4)..(4): X is T or S
  MISC_FEATURE (5)..(5): X is K, R or H for basic amino acids
  MISC_FEATURE (6)..(6): X is I, L or V
  MISC_FEATURE (7)..(7): X is F, W or Y for aromatic amino acids
  MISC_FEATURE (8)..(8): X is N or Q for amidated amino acids
  MISC_FEATURE (9)..(9): X is F or P
  MISC_FEATURE (10)..(10): X is T or S
  MISC_FEATURE (11)..(11): X is 5-aminopentanoic acid for replacement of 3 or 4 amino acids of X2 and X3
  MISC_FEATURE (12)..(12): X is M or Nle (Norleucine)
  MISC_FEATURE (13)..(13): X is A and G
  MISC_FEATURE (14)..(14): X is K, R or H for basic amino acids
  MISC_FEATURE (15)..(15): X is 5-aminopentanoic acid for replacement of 3 or 4 amino acids of X2 and X3
XXXXXXXXXXXXXXX

SEQ ID NO: 753 - protein, 13 aa, Artificial
  Completely synthesized peptide construct
VIVELIPSTSSAV

SEQ ID NO: 754 - protein, 18 aa, Artificial
  Completely synthesized peptide construct
DTPYLDITYHFVMQRLPL

SEQ ID NO: 755 - protein, 18 aa, Artificial
  Completely synthesized peptide construct
  MISC_FEATURE (1)..(1): X is D and E for acidic amino acids
  MISC_FEATURE (2)..(2): X is T or S
  MISC_FEATURE (3)..(3): X is F or P
  MISC_FEATURE (4)..(4): X is F, W or Y for aromatic amino acids
  MISC_FEATURE (5)..(5): X is I, L or V
  MISC_FEATURE (6)..(6): X is D and E for acidic amino acids
  MISC_FEATURE (7)..(7): X is I, L or V
  MISC_FEATURE (8)..(8): X is T or S
  MISC_FEATURE (9)..(9): X is F, W or Y for aromatic amino acids
  MISC_FEATURE (10)..(10): X is K, R or H for basic amino acids
  MISC_FEATURE (11)..(11): X is F or P
  MISC_FEATURE (12)..(12): X is I, L or V
  MISC_FEATURE (13)..(13): X is M or Nle (Norleucine)
  MISC_FEATURE (14)..(14): X is N or Q for amidated amino acids
  MISC_FEATURE (15)..(15): X is K, R or H for basic amino acids
  MISC_FEATURE (16)..(16): X is I, L or V
  MISC_FEATURE (17)..(17): X is F or P
  MISC_FEATURE (18)..(18): X is I, L or V
XXXXXXXXXXXXXXXXXX

SEQ ID NO: 756 - protein, 17 aa, Artificial
  Completely synthesized peptide construct
  MISC_FEATURE (1)..(1): X is D and E for acidic amino acids
  MISC_FEATURE (2)..(2): X is T or S
  MISC_FEATURE (3)..(3): X is F or P
  MISC_FEATURE (4)..(4): X is F, W or Y for aromatic amino acids
  MISC_FEATURE (5)..(5): X is GabaX for X2X3 or X3X2 or X2X3 or X3X2 or X3X3 or X2X2
  MISC_FEATURE (6)..(6): X is I, L or V
  MISC_FEATURE (7)..(7): X is T or S
  MISC_FEATURE (8)..(8): X is F, W or Y for aromatic amino acids
  MISC_FEATURE (9)..(9): X is K, R or H for basic amino acids
  MISC_FEATURE (10)..(10): X is F or P
  MISC_FEATURE (11)..(11): X is I, L or V
  MISC_FEATURE (12)..(12): X is M or Nle (Norleucine)
  MISC_FEATURE (13)..(13): X is N or Q for amidated amino acids
  MISC_FEATURE (14)..(14): X is K, R or H for basic amino acids
  MISC_FEATURE (15)..(15): X is I, L or V
  MISC_FEATURE (16)..(16): X is F or P
  MISC_FEATURE (17)..(17): X is I, L or V
XXXXXXXXXXXXXXXXX

SEQ ID NO: 757 - protein, 17 aa, Artificial
  Completely synthesized peptide construct
  MISC_FEATURE (1)..(1): X is D and E for acidic amino acids
  MISC_FEATURE (2)..(2): X is T or S
  MISC_FEATURE (3)..(3): X is F or P
  MISC_FEATURE (4)..(4): X is F, W or Y for aromatic amino acids
  MISC_FEATURE (5)..(5): X is I, L or V
  MISC_FEATURE (6)..(6): X is GabaX for X2X3 or X3X2 or X2X3 or X3X2 or X3X3 or X2X2
  MISC_FEATURE (7)..(7): X is T or S
  MISC_FEATURE (8)..(8): X is F, W or Y for aromatic amino acids
  MISC_FEATURE (9)..(9): X is K, R or H for basic amino acids
  MISC_FEATURE (10)..(10): X is F or P
  MISC_FEATURE (11)..(11): X is I, L or V
  MISC_FEATURE (12)..(12): X is M or Nle (Norleucine)
  MISC_FEATURE (13)..(13): X is N or Q for amidated amino acids
  MISC_FEATURE (14)..(14): X is K, R or H for basic amino acids
  MISC_FEATURE (15)..(15): X is I, L or V
  MISC_FEATURE (16)..(16): X is F or P
  MISC_FEATURE (17)..(17): X is I, L or V
XXXXXXXXXXXXXXXXX

SEQ ID NO: 758 - protein, 16 aa, Artificial
  Completely synthesized peptide construct
  MISC_FEATURE (1)..(1): X is D and E for acidic amino acids
  MISC_FEATURE (2)..(2): X is T or S
  MISC_FEATURE (3)..(3): X is F or P
  MISC_FEATURE (4)..(4): X is F, W or Y for aromatic amino acids
  MISC_FEATURE (5)..(5): X is 5-aminopentanoic acid for replacement of 3 or 4 amino acids of X2 and X3
  MISC_FEATURE (6)..(6): X is T or S
  MISC_FEATURE (7)..(7): X is F, W or Y for aromatic amino acids
  MISC_FEATURE (8)..(8): X is K, R or H for basic amino acids
  MISC_FEATURE (9)..(9): X is F or P
  MISC_FEATURE (10)..(10): X is I, L or V
  MISC_FEATURE (11)..(11): X is M or Nle (Norleucine)
  MISC_FEATURE (12)..(12): X is N or Q for amidated amino acids
  MISC_FEATURE (13)..(13): X is K, R or H for basic amino acids
  MISC_FEATURE (14)..(14): X is I, L or V
  MISC_FEATURE (15)..(15): X is F or P
  MISC_FEATURE (16)..(16): X is I, L or V
XXXXXXXXXXXXXXXX

SEQ ID NO: 759 - protein, 19 aa, Artificial
  Completely synthesized peptide construct
  MISC_FEATURE (1)..(1): X is acetyl or propionyl group, D glycine or D alanine, cyclohexylalanine at amino terminus
  MISC_FEATURE (2)..(2): X is D and E for acidic amino acids
  MISC_FEATURE (3)..(3): X is T or S
  MISC_FEATURE (4)..(4): X is F or P
  MISC_FEATURE (5)..(5): X is F, W or Y for aromatic amino acids
  MISC_FEATURE (6)..(6): X is I, L or V
  MISC_FEATURE (7)..(7): X is D and E for acidic amino acids
  MISC_FEATURE (8)..(8): X is I, L or V
  MISC_FEATURE (9)..(9): X is T or S
  MISC_FEATURE (10)..(10): X is F, W or Y for aromatic amino acids
  MISC_FEATURE (11)..(11): X is K, R or H for basic amino acids
  MISC_FEATURE (12)..(12): X is F or P
  MISC_FEATURE (13)..(13): X is I, L or V
  MISC_FEATURE (14)..(14): X is M or Nle (Norleucine)
  MISC_FEATURE (15)..(15): X is N or Q for amidated amino acids
  MISC_FEATURE (16)..(16): X is K, R or H for basic amino acids
  MISC_FEATURE (17)..(17): X is I, L or V
  MISC_FEATURE (18)..(18): X is F or P
  MISC_FEATURE (19)..(19): X is I, L or V
XXXXXXXXXXXXXXXXXXX

SEQ ID NO: 760 - protein, 18 aa, Artificial
  Completely synthesized peptide construct
  MISC_FEATURE (1)..(1): X is acetyl or propionyl group, D glycine or D alanine, cyclohexylalanine at amino terminus
  MISC_FEATURE (2)..(2): X is D and E for acidic amino acids
  MISC_FEATURE (3)..(3): X is T or S
  MISC_FEATURE (4)..(4): X is F or P
  MISC_FEATURE (5)..(5): X is F, W or Y for aromatic amino acids
  MISC_FEATURE (6)..(6): X is GabaX for X2X3 or X3X2 or X2X3 or X3X2 or X3X3 or X2X2
  MISC_FEATURE (7)..(7): X is I, L or V
  MISC_FEATURE (8)..(8): X is T or S
  MISC_FEATURE (9)..(9): X is F, W or Y for aromatic amino acids
  MISC_FEATURE (10)..(10): X is K, R or H for basic amino acids
  MISC_FEATURE (11)..(11): X is F or P
  MISC_FEATURE (12)..(12): X is I, L or V
  MISC_FEATURE (13)..(13): X is M or Nle (Norleucine)
  MISC_FEATURE (14)..(14): X is N or Q for amidated amino acids
  MISC_FEATURE (15)..(15): X is K, R or H for basic amino acids
  MISC_FEATURE (16)..(16): X is I, L or V
  MISC_FEATURE (17)..(17): X is F or P
  MISC_FEATURE (18)..(18): X is I, L or V
XXXXXXXXXXXXXXXXXX

SEQ ID NO: 761 - protein, 18 aa, Artificial
  Completely synthesized peptide construct
  MISC_FEATURE (1)..(1): X is acetyl or propionyl group, D glycine or D alanine, cyclohexylalanine at amino terminus
  MISC_FEATURE (2)..(2): X is D and E for acidic amino acids
  MISC_FEATURE (3)..(3): X is T or S
  MISC_FEATURE (4)..(4): X is F or P
  MISC_FEATURE (5)..(5): X is F, W or Y for aromatic amino acids
  MISC_FEATURE (6)..(6): X is I, L or V
  MISC_FEATURE (7)..(7): X is GabaX for X2X3 or X3X2 or X2X3 or X3X2 or X3X3 or X2X2
  MISC_FEATURE (8)..(8): X is T or S
  MISC_FEATURE (9)..(9): X is F, W or Y for aromatic amino acids
  MISC_FEATURE (10)..(10): X is K, R or H for basic amino acids
  MISC_FEATURE (11)..(11): X is F or P
  MISC_FEATURE (12)..(12): X is I, L or V
  MISC_FEATURE (13)..(13): X is M or Nle (Norleucine)
  MISC_FEATURE (14)..(14): X is N or Q for amidated amino acids
  MISC_FEATURE (15)..(15): X is K, R or H for basic amino acids
  MISC_FEATURE (16)..(16): X is I, L or V
  MISC_FEATURE (17)..(17): X is F or P
  MISC_FEATURE (18)..(18): X is I, L or V
XXXXXXXXXXXXXXXXXX

SEQ ID NO: 762 - protein, 17 aa, Artificial
  Completely synthesized peptide construct
  MISC_FEATURE (1)..(1): X is acetyl or propionyl group, D glycine or D alanine, cyclohexylalanine at amino terminus
  MISC_FEATURE (2)..(2): X is D and E for acidic amino acids
  MISC_FEATURE (3)..(3): X is T or S
  MISC_FEATURE (4)..(4): X is F or P
  MISC_FEATURE (5)..(5): X is F, W or Y for aromatic amino acids
  MISC_FEATURE (6)..(6): X is 5-aminopentanoic acid for replacement of 3 or 4 amino acids of X2 and X3
  MISC_FEATURE (7)..(7): X is T or S
  MISC_FEATURE (8)..(8): X is F, W or Y for aromatic amino acids
  MISC_FEATURE (9)..(9): X is K, R or H for basic amino acids
  MISC_FEATURE (10)..(10): X is F or P
  MISC_FEATURE (11)..(11): X is I, L or V
  MISC_FEATURE (12)..(12): X is M or Nle (Norleucine)
  MISC_FEATURE (13)..(13): X is N or Q for amidated amino acids
  MISC_FEATURE (14)..(14): X is K, R or H for basic amino acids
  MISC_FEATURE (15)..(15): X is I, L or V
  MISC_FEATURE (16)..(16): X is F or P
  MISC_FEATURE (17)..(17): X is I, L or V
XXXXXXXXXXXXXXXXX

SEQ ID NO: 763 - protein, 9 aa, Artificial
  Completely synthesized peptide construct
AYMTMKIRN

SEQ ID NO: 764 - protein, 9 aa, Artificial
  Completely synthesized peptide construct
  MISC_FEATURE (1)..(1): X is A and G
  MISC_FEATURE (2)..(2): X is F, W or Y for aromatic amino acids
  MISC_FEATURE (3)..(3): X is M or Nle (Norleucine)
  MISC_FEATURE (4)..(4): X is T or S
  MISC_FEATURE (5)..(5): X is M or Nle (Norleucine)
  MISC_FEATURE (6)..(6): X is K, R or H for basic amino acids
  MISC_FEATURE (7)..(7): X is I, L or V
  MISC_FEATURE (8)..(8): X is K, R or H for basic amino acids
  MISC_FEATURE (9)..(9): X is N or Q for amidated amino acids
XXXXXXXXX

SEQ ID NO: 765 - protein, 10 aa, Artificial
  Completely synthesized peptide construct
  MISC_FEATURE (1)..(1): X is acetyl or propionyl group, D glycine or D alanine, cyclohexylalanine at amino terminus
  MISC_FEATURE (2)..(2): X is A and G
  MISC_FEATURE (3)..(3): X is F, W or Y for aromatic amino acids
  MISC_FEATURE (4)..(4): X is M or Nle (Norleucine)
  MISC_FEATURE (5)..(5): X is T or S
  MISC_FEATURE (6)..(6): X is M or Nle (Norleucine)
  MISC_FEATURE (7)..(7): X is K, R or H for basic amino acids
  MISC_FEATURE (8)..(8): X is I, L or V
  MISC_FEATURE (9)..(9): X is K, R or H for basic amino acids
  MISC_FEATURE (10)..(10): X is N or Q for amidated amino acids
XXXXXXXXXX

SEQ ID NO: 766 - protein, 17 aa, Artificial
  Completely synthesized peptide construct
SVKLSIAVKNKAEFHQS

SEQ ID NO: 767 - protein, 17 aa, Artificial
  Completely synthesized peptide construct
SVKLSIAVKNKAEFHQS

SEQ ID NO: 768 - protein, 17 aa, Artificial
  Completely synthesized peptide construct
SVKLSIAVKNKAEFHQS

SEQ ID NO: 769 - protein, 25 aa, Artificial
  Completely synthesized peptide construct
KRKLEGDLKLTQESIMDLENDKQQL

SEQ ID NO: 770 - protein, 25 aa, Artificial
  Completely synthesized peptide construct
  MISC_FEATURE (1)..(1): X is K, R or H for basic amino acids
  MISC_FEATURE (2)..(2): X is K, R or H for basic amino acids
  MISC_FEATURE (3)..(3): X is K, R or H for basic amino acids
  MISC_FEATURE (4)..(4): X is I, L or V
  MISC_FEATURE (5)..(5): X is D and E for acidic amino acids
  MISC_FEATURE (6)..(6): X is A and G
  MISC_FEATURE (7)..(7): X is D and E for acidic amino acids
  MISC_FEATURE (8)..(8): X is I, L or V
  MISC_FEATURE (9)..(9): X is K, R or H for basic amino acids
  MISC_FEATURE (10)..(10): X is I, L or V
  MISC_FEATURE (11)..(11): X is T or S
  MISC_FEATURE (12)..(12): X is N or Q for amidated amino acids
  MISC_FEATURE (13)..(13): X is I, L or V
  MISC_FEATURE (14)..(14): X is T or S
  MISC_FEATURE (15)..(15): X is I, L or V
  MISC_FEATURE (16)..(16): X is M or Nle (Norleucine)
  MISC_FEATURE (17)..(17): X is D and E for acidic amino acids
  MISC_FEATURE (18)..(18): X is I, L or V
  MISC_FEATURE (19)..(19): X is D and E for acidic amino acids
  MISC_FEATURE (20)..(20): X is N or Q for amidated amino acids
  MISC_FEATURE (21)..(21): X is D and E for acidic amino acids
  MISC_FEATURE (22)..(22): X is K, R or H for basic amino acids
  MISC_FEATURE (23)..(23): X is N or Q for amidated amino acids
  MISC_FEATURE (24)..(24): X is N or Q for amidated amino acids
  MISC_FEATURE (25)..(25): X is I, L or V
XXXXXXXXXXXXXXXXXXXXXXXXX

SEQ ID NO: 771 - protein, 26 aa, Artificial
  Completely synthesized peptide construct
  MISC_FEATURE (1)..(1): X is acetyl or propionyl group, D glycine or D alanine, cyclohexylalanine at amino terminus
  MISC_FEATURE (2)..(2): X is K, R or H for basic amino acids
  MISC_FEATURE (3)..(3): X is K, R or H for basic amino acids
  MISC_FEATURE (4)..(4): X is K, R or H for basic amino acids
  MISC_FEATURE (5)..(5): X is I, L or V
  MISC_FEATURE (6)..(6): X is D and E for acidic amino acids
  MISC_FEATURE (7)..(7): X is A and G
  MISC_FEATURE (8)..(8): X is D and E for acidic amino acids
  MISC_FEATURE (9)..(9): X is I, L or V
  MISC_FEATURE (10)..(10): X is K, R or H for basic amino acids
  MISC_FEATURE (11)..(11): X is I, L or V
  MISC_FEATURE (12)..(12): X is T or S
  MISC_FEATURE (13)..(13): X is N or Q for amidated amino acids
  MISC_FEATURE (14)..(14): X is I, L or V
  MISC_FEATURE (15)..(15): X is T or S
  MISC_FEATURE (16)..(16): X is I, L or V
  MISC_FEATURE (17)..(17): X is M or Nle (Norleucine)
  MISC_FEATURE (18)..(18): X is D and E for acidic amino groups
  MISC_FEATURE (19)..(19): X is I, L or V
  MISC_FEATURE (20)..(20): X is D and E for acidic amino acids
  MISC_FEATURE (21)..(21): X is N or Q for amidated amino acids
  MISC_FEATURE (22)..(22): X is D and E for acidic amino acids
  MISC_FEATURE (23)..(23): X is K, R or H for basic amino acids
  MISC_FEATURE (24)..(24): X is N or Q for amidated amino acids
  MISC_FEATURE (25)..(25): X is N or Q for amidated amino acids
  MISC_FEATURE (26)..(26): X is I, L or V
XXXXXXXXXXXXXXXXXXXXXXXXXX

SEQ ID NO: 772 - protein, 22 aa, Artificial
  Completely synthesized peptide construct
  MISC_FEATURE (1)..(1): X is K, R or H for basic amino acids
  MISC_FEATURE (2)..(2): X is K, R or H for basic amino acids
  MISC_FEATURE (3)..(3): X is K, R or H for basic amino acids
  MISC_FEATURE (4)..(4): X is GabaX for X2X3 or X3X2 or X2X3 or X3X2 or X3X3 or X2X2
  MISC_FEATURE (5)..(5): X is A and G
  MISC_FEATURE (6)..(6): X is GabaX for X2X3 or X3X2 or X2X3 or X3X2 or X3X3 or X2X2
  MISC_FEATURE (7)..(7): X is K, R or H for basic amino acids
  MISC_FEATURE (8)..(8): X is I, L or V
  MISC_FEATURE (9)..(9): X is T or S
  MISC_FEATURE (10)..(10): X is N or Q for amidated amino acids
  MISC_FEATURE (11)..(11): X is I, L or V
  MISC_FEATURE (12)..(12): X is T or S
  MISC_FEATURE (13)..(13): X is I, L or V
  MISC_FEATURE (14)..(14): X is M or Nle (Norleucine)
  MISC_FEATURE (15)..(15): X is GabaX for X2X3 or X3X2 or X2X3 or X3X2 or X3X3 or X2X2
  MISC_FEATURE (16)..(16): X is D and E for acidic amino acids
  MISC_FEATURE (17)..(17): X is N or Q for amidated amino acids
  MISC_FEATURE (18)..(18): X is D and E for acidic amino acids
  MISC_FEATURE (19)..(19): X is K, R or H for basic amino acids
  MISC_FEATURE (20)..(20): X is N or Q for amidated amino acids
  MISC_FEATURE (21)..(21): X is N or Q for amidated amino acids
  MISC_FEATURE (22)..(22): X is I, L or V
XXXXXXXXXXXXXXXXXXXXXX

SEQ ID NO: 773 - protein, 23 aa, Artificial
  Completely synthesized peptide construct
  MISC_FEATURE (1)..(1): X is acetyl or propionyl group, D glycine or D alanine, cyclohexylalanine at amino terminus
  MISC_FEATURE (2)..(2): X is K, R or H for basic amino acids
  MISC_FEATURE (3)..(3): X is K, R or H for basic amino acids
  MISC_FEATURE (4)..(4): X is K, R or H for basic amino acids
  MISC_FEATURE (5)..(5): X is GabaX for X2X3 or X3X2 or X2X3 or X3X2 or X3X3 or X2X2
  MISC_FEATURE (6)..(6): X is A and G
  MISC_FEATURE (7)..(7): X is GabaX for X2X3 or X3X2 or X2X3 or X3X2 or X3X3 or X2X2
  MISC_FEATURE (8)..(8): X is K, R or H for basic amino acids
  MISC_FEATURE (9)..(9): X is I, L or V
  MISC_FEATURE (10)..(10): X is T or S
  MISC_FEATURE (11)..(11): X is N or Q for amidated amino acids
  MISC_FEATURE (12)..(12): X is I, L or V
  MISC_FEATURE (13)..(13): X is T or S
  MISC_FEATURE (14)..(14): X is I, L or V
  MISC_FEATURE (15)..(15): X is M or Nle (Norleucine)
  MISC_FEATURE (16)..(16): X is GabaX for X2X3 or X3X2 or X2X3 or X3X2 or X3X3 or X2X2
  MISC_FEATURE (17)..(17): X is D and E for acidic amino acids
  MISC_FEATURE (18)..(18): X is N or Q for amidated amino acids
  MISC_FEATURE (19)..(19): X is D and E for acidic amino acids
  MISC_FEATURE (20)..(20): X is K, R or H for basic amino acids
  MISC_FEATURE (21)..(21): X is N or Q for amidated amino acids
  MISC_FEATURE (22)..(22): X is N or Q for amidated amino acids
  MISC_FEATURE (23)..(23): X is I, L or V
XXXXXXXXXXXXXXXXXXXXXXX

SEQ ID NO: 774 - protein, 23 aa, Artificial
  Completely synthesized peptide construct
  MISC_FEATURE (1)..(1): X is K, R or H for basic amino acids
  MISC_FEATURE (2)..(2): X is K, R or H for basic amino acids
  MISC_FEATURE (3)..(3): X is K, R or H for basic amino acids
  MISC_FEATURE (4)..(4): X is I, L or V
  MISC_FEATURE (5)..(5): X is D and E for acidic amino acids
  MISC_FEATURE (6)..(6): X is A and G
  MISC_FEATURE (7)..(7): X is D and E for acidic amino acids
  MISC_FEATURE (8)..(8): X is I, L or V
  MISC_FEATURE (9)..(9): X is K, R or H for basic amino acids
  MISC_FEATURE (10)..(10): X is I, L or V
  MISC_FEATURE (11)..(11): X is T or S
  MISC_FEATURE (12)..(12): X is N or Q for amidated amino acids
  MISC_FEATURE (13)..(13): X is I, L or V
  MISC_FEATURE (14)..(14): X is T or S
  MISC_FEATURE (15)..(15): X is I, L or V
  MISC_FEATURE (16)..(16): X is M or Nle (Norleucine)
  MISC_FEATURE (17)..(17): X is 5-aminopentanoic acid for replacement of 3 or 4 amino acids of X2 and X3
  MISC_FEATURE (18)..(18): X is N or Q for amidated amino acids
  MISC_FEATURE (19)..(19): X is D and E for acidic amino acids
  MISC_FEATURE (20)..(20): X is K, R or H for basic amino acids
  MISC_FEATURE (21)..(21): X is N or Q for amidated amino acids
  MISC_FEATURE (22)..(22): X is N or Q for amidated amino acids
  MISC_FEATURE (23)..(23): X is I, L or V
XXXXXXXXXXXXXXXXXXXXXXX

SEQ ID NO: 775 - protein, 24 aa, Artificial
  Completely synthesized peptide construct
  MISC_FEATURE (1)..(1): X is acetyl or propionyl group, D glycine or D alanine, cyclohexylalanine at amino terminus
  MISC_FEATURE (2)..(2): X is K, R or H for basic amino acids
  MISC_FEATURE (3)..(3): X is K, R or H for basic amino acids
  MISC_FEATURE (4)..(4): X is K, R or H for basic amino acids
  MISC_FEATURE (5)..(5): X is I, L or V
  MISC_FEATURE (6)..(6): X is D and E for acidic amino acids
  MISC_FEATURE (7)..(7): X is A and G
  MISC_FEATURE (8)..(8): X is D and E for acidic amino acids
  MISC_FEATURE (9)..(9): X is I, L or V
  MISC_FEATURE (10)..(10): X is K, R or H for basic amino acids
  MISC_FEATURE (11)..(11): X is I, L or V
  MISC_FEATURE (12)..(12): X is T or S
  MISC_FEATURE (13)..(13): X is N or Q for amidated amino acids
  MISC_FEATURE (14)..(14): X is I, L or V
  MISC_FEATURE (15)..(15): X is T or S
  MISC_FEATURE (16)..(16): X is I, L or V
  MISC_FEATURE (17)..(17): X is M or Nle (Norleucine)
  MISC_FEATURE (18)..(18): X is 5-aminopentanoic acid for replacement of 3 or 4 amino acids of X2 and X3
  MISC_FEATURE (19)..(19): X is N or Q for amidated amino acids
  MISC_FEATURE (20)..(20): X is D and E for acidic amino acids
  MISC_FEATURE (21)..(21): X is K, R or H for basic amino acids
  MISC_FEATURE (22)..(22): X is N or Q for amidated amino acids
  MISC_FEATURE (23)..(23): X is N or Q for amidated amino acids
  MISC_FEATURE (24)..(24): X is I, L or V
XXXXXXXXXXXXXXXXXXXXXXXX

SEQ ID NO: 776 - protein, 19 aa, Artificial
  Completely synthesized peptide construct
VRRLAMENNIKLSEVVGSG

SEQ ID NO: 777 - protein, 19 aa, Artificial
  Completely synthesized peptide construct
  MISC_FEATURE (1)..(1): X is I, L or V
  MISC_FEATURE (2)..(2): X is K, R or H for basic amino acids
  MISC_FEATURE (3)..(3): X is K, R or H for basic amino acids
  MISC_FEATURE (4)..(4): X is I, L or V
  MISC_FEATURE (5)..(5): X is A and G
  MISC_FEATURE (6)..(6): X is M or Nle (Norleucine)
  MISC_FEATURE (7)..(7): X is D and E for acidic amino acids
  MISC_FEATURE (8)..(8): X is N or Q for amidated amino acids
  MISC_FEATURE (9)..(9): X is N or Q for amidated amino acids
  MISC_FEATURE (10)..(10): X is I, L or V
  MISC_FEATURE (11)..(11): X is K, R or H for basic amino acids
  MISC_FEATURE (12)..(12): X is I, L or V
  MISC_FEATURE (13)..(13): X is T or S
  MISC_FEATURE (14)..(14): X is D and E for acidic amino acids
  MISC_FEATURE (15)..(15): X is I, L or V
  MISC_FEATURE (16)..(16): X is I, L or V
  MISC_FEATURE (17)..(17): X is A and G
  MISC_FEATURE (18)..(18): X is T or S
  MISC_FEATURE (19)..(19): X is A and G
XXXXXXXXXXXXXXXXXXX

SEQ ID NO: 778 - protein, 20 aa, Artificial
  Completely synthesized peptide construct
  MISC_FEATURE (1)..(1): X is acetyl or propionyl group, D glycine or D alanine, cyclohexylalanine at amino terminus
  MISC_FEATURE (2)..(2): X is I, L or V
  MISC_FEATURE (3)..(3): X is K, R or H for basic amino acids
  MISC_FEATURE (4)..(4): X is K, R or H for basic amino acids
  MISC_FEATURE (5)..(5): X is I, L or V
  MISC_FEATURE (6)..(6): X is A and G
  MISC_FEATURE (7)..(7): X is M or Nle (Norleucine)
  MISC_FEATURE (8)..(8): X is D and E for acidic amino acids
  MISC_FEATURE (9)..(9): X is N or Q for amidated amino acids
  MISC_FEATURE (10)..(10): X is N or Q for amidated amino acids
  MISC_FEATURE (11)..(11): X is I, L or V
  MISC_FEATURE (12)..(12): X is K, R or H for basic amino acids
  MISC_FEATURE (13)..(13): X is I, L or V
  MISC_FEATURE (14)..(14): X is T or S
  MISC_FEATURE (15)..(15): X is D and E for acidic amino acids
  MISC_FEATURE (16)..(16): X is I, L or V
  MISC_FEATURE (17)..(17): X is I, L or V
  MISC_FEATURE (18)..(18): X is A and G
  MISC_FEATURE (19)..(19): X is T or S
  MISC_FEATURE (20)..(20): X is A and G
XXXXXXXXXXXXXXXXXXXX

SEQ ID NO: 779 - protein, 18 aa, Artificial
  Completely synthesized peptide construct
  MISC_FEATURE (1)..(1): X is I, L or V
  MISC_FEATURE (2)..(2): X is K, R or H for basic amino acids
  MISC_FEATURE (3)..(3): X is K, R or H for basic amino acids
  MISC_FEATURE (4)..(4): X is I, L or V
  MISC_FEATURE (5)..(5): X is A and G
  MISC_FEATURE (6)..(6): X is M or Nle (Norleucine)
  MISC_FEATURE (7)..(7): X is D and E for acidic amino acids
  MISC_FEATURE (8)..(8): X is N or Q for amidated amino acids
  MISC_FEATURE (9)..(9): X is N or Q for amidated amino acids
  MISC_FEATURE (10)..(10): X is I, L or V
  MISC_FEATURE (11)..(11): X is K, R or H for basic amino acids
  MISC_FEATURE (12)..(12): X is I, L or V
  MISC_FEATURE (13)..(13): X is T or S
  MISC_FEATURE (14)..(14): X is GabaX for X2X3 or X3X2 or X2X3 or X3X2 or X3X3 or X2X2
  MISC_FEATURE (15)..(15): X is I, L or V
  MISC_FEATURE (16)..(16): X is A and G
  MISC_FEATURE (17)..(17): X is T or S
  MISC_FEATURE (18)..(18): X is A and G
XXXXXXXXXXXXXXXXXX

SEQ ID NO: 780 - protein, 17 aa, Artificial
  Completely synthesized peptide construct
  MISC_FEATURE (1)..(1): X is I, L or V
  MISC_FEATURE (2)..(2): X is K, R or H for basic amino acids
  MISC_FEATURE (3)..(3): X is K, R or H for basic amino acids
  MISC_FEATURE (4)..(4): X is I, L or V
  MISC_FEATURE (5)..(5): X is A and G
  MISC_FEATURE (6)..(6): X is M or Nle (Norleucine)
  MISC_FEATURE (7)..(7): X is D and E for acidic amino acids
  MISC_FEATURE (8)..(8): X is N or Q for amidated amino acids
  MISC_FEATURE (9)..(9): X is N or Q for amidated amino acids
  MISC_FEATURE (10)..(10): X is I, L or V
  MISC_FEATURE (11)..(11): X is K, R or H for basic amino acids
  MISC_FEATURE (12)..(12): X is I, L or V
  MISC_FEATURE (13)..(13): X is T or S
  MISC_FEATURE (14)..(14): X is 5-aminopentanoic acid for replacement of 3 or 4 amino acids of X2 and X3
  MISC_FEATURE (15)..(15): X is A and G
  MISC_FEATURE (16)..(16): X is T or S
  MISC_FEATURE (17)..(17): X is A and G
XXXXXXXXXXXXXXXXX

SEQ ID NO: 781 - protein, 19 aa, Artificial
  Completely synthesized peptide construct
  MISC_FEATURE (1)..(1): X is acetyl or propionyl group, D glycine or D alanine, cyclohexylalanine at amino terminus
  MISC_FEATURE (2)..(2): X is I, L or V
  MISC_FEATURE (3)..(3): X is K, R or H for basic amino acids
  MISC_FEATURE (4)..(4): X is K, R or H for basic amino acids
  MISC_FEATURE (5)..(5): X is I, L or V
  MISC_FEATURE (6)..(6): X is A and G
  MISC_FEATURE (7)..(7): X is M or Nle (Norleucine)
  MISC_FEATURE (8)..(8): X is D and E for acidic amino acids
  MISC_FEATURE (9)..(9): X is N or Q for amidated amino acids
  MISC_FEATURE (10)..(10): X is N or Q for amidated amino acids
  MISC_FEATURE (11)..(11): X is I, L or V
  MISC_FEATURE (12)..(12): X is K, R or H for basic amino acids
  MISC_FEATURE (13)..(13): X is I, L or V
  MISC_FEATURE (14)..(14): X is T or S
  MISC_FEATURE (15)..(15): X is GabaX for X2X3 or X3X2 or X2X3 or X3X2 or X3X3 or X2X2
  MISC_FEATURE (16)..(16): X is I, L or V
  MISC_FEATURE (17)..(17): X is A and G
  MISC_FEATURE (18)..(18): X is T or S
  MISC_FEATURE (19)..(19): X is A and G
XXXXXXXXXXXXXXXXXXX

SEQ ID NO: 782 - protein, 18 aa, Artificial
  Completely synthesized peptide construct
  MISC_FEATURE (1)..(1): X is acetyl or propionyl group, D glycine or D alanine, cyclohexylalanine at amino terminus
  MISC_FEATURE (2)..(2): X is I, L or V
  MISC_FEATURE (3)..(3): X is K, R or H for basic amino acids
  MISC_FEATURE (4)..(4): X is K, R or H for basic amino acids
  MISC_FEATURE (5)..(5): X is I, L or V
  MISC_FEATURE (6)..(6): X is A and G
  MISC_FEATURE (7)..(7): X is M or Nle (Norleucine)
  MISC_FEATURE (8)..(8): X is D and E for acidic amino acids
  MISC_FEATURE (9)..(9): X is N or Q for amidated amino acids
  MISC_FEATURE (10)..(10): X is N or Q for amidated amino acids
  MISC_FEATURE (11)..(11): X is I, L or V
  MISC_FEATURE (12)..(12): X is K, R or H for basic amino acids
  MISC_FEATURE (13)..(13): X is I, L or V
  MISC_FEATURE (14)..(14): X is T or S
  MISC_FEATURE (15)..(15): X is 5-aminopentanoic acid for replacement of 3 or 4 amino acids of X2 and X3
  MISC_FEATURE (16)..(16): X is A and G
  MISC_FEATURE (17)..(17): X is T or S
  MISC_FEATURE (18)..(18): X is A and G
XXXXXXXXXXXXXXXXXX

SEQ ID NO: 783 - protein, 18 aa, Artificial
  Completely synthesized peptide construct
KEALISSLTRGKLTYTQQ

SEQ ID NO: 784 - protein, 18 aa, Artificial
  Completely synthesized peptide construct
  MISC_FEATURE (1)..(1): X is K, R or H for basic amino acids
  MISC_FEATURE (2)..(2): X is D and E for acidic amino acids
  MISC_FEATURE (3)..(3): X is A and G
  MISC_FEATURE (4)..(4): X is I, L or V
  MISC_FEATURE (5)..(5): X is I, L or V
  MISC_FEATURE (6)..(6): X is T or S
  MISC_FEATURE (7)..(7): X is T or S
  MISC_FEATURE (8)..(8): X is I, L or V
  MISC_FEATURE (9)..(9): X is T or S
  MISC_FEATURE (10)..(10): X is K, R or H for basic amino acids
  MISC_FEATURE (11)..(11): X is A and G
  MISC_FEATURE (12)..(12): X is K, R or H for basic amino acids
  MISC_FEATURE (13)..(13): X is I, L or V
  MISC_FEATURE (14)..(14): X is T or S
  MISC_FEATURE (15)..(15): X is F, W or Y for aromatic amino acids
  MISC_FEATURE (16)..(16): X is T or S
  MISC_FEATURE (17)..(17): X is N or Q for amidated amino acids
  MISC_FEATURE (18)..(18): X is N or Q for amidated amino acids
XXXXXXXXXXXXXXXXXX

SEQ ID NO: 785 - protein, 19 aa, Artificial
  Completely synthesized peptide construct
  MISC_FEATURE (1)..(1): X is acetyl or propionyl group, D glycine or D alanine, cyclohexylalanine at amino terminus
  MISC_FEATURE (2)..(2): X is K, R or H for basic amino acids
  MISC_FEATURE (3)..(3): X is D and E for acidic amino acids
  MISC_FEATURE (4)..(4): X is A and G
  MISC_FEATURE (5)..(5): X is I, L or V
  MISC_FEATURE (6)..(6): X is I, L or V
  MISC_FEATURE (7)..(7): X is T or S
  MISC_FEATURE (8)..(8): X is T or S
  MISC_FEATURE (9)..(9): X is I, L or V
  MISC_FEATURE (10)..(10): X is T or S
  MISC_FEATURE (11)..(11): X is K, R or H for basic amino acids
  MISC_FEATURE (12)..(12): X is A and G
  MISC_FEATURE (13)..(13): X is K, R or H for basic amino acids
  MISC_FEATURE (14)..(14): X is I, L or V
  MISC_FEATURE (15)..(15): X is T or S
  MISC_FEATURE (16)..(16): X is F, W or Y for aromatic amino acids
  MISC_FEATURE (17)..(17): X is T or S
  MISC_FEATURE (18)..(18): X is N or Q for amidated amino acids
  MISC_FEATURE (19)..(19): X is N or Q for amidated amino acids
XXXXXXXXXXXXXXXXXXX

SEQ ID NO: 786 - protein, 17 aa, Artificial
  Completely synthesized peptide construct
  MISC_FEATURE (1)..(1): X is K, R or H for basic amino acids
  MISC_FEATURE (2)..(2): X is D and E for acidic amino acids
  MISC_FEATURE (3)..(3): X is A and G
  MISC_FEATURE (4)..(4): X is GabaX for X2X3 or X3X2 or X2X3 or X3X2 or X3X3 or X2X2
  MISC_FEATURE (5)..(5): X is T or S
  MISC_FEATURE (6)..(6): X is T or S
  MISC_FEATURE (7)..(7): X is I, L or V
  MISC_FEATURE (8)..(8): X is T or S
  MISC_FEATURE (9)..(9): X is K, R or H for basic amino acids
  MISC_FEATURE (10)..(10): X is A and G
  MISC_FEATURE (11)..(11): X is K, R or H for basic amino acids
  MISC_FEATURE (12)..(12): X is I, L or V
  MISC_FEATURE (13)..(13): X is T or S
  MISC_FEATURE (14)..(14): X is F, W or Y for aromatic amino acids
  MISC_FEATURE (15)..(15): X is T or S
  MISC_FEATURE (16)..(16): X is N or Q for amidated amino acids
  MISC_FEATURE (17)..(17): X is N or Q for amidated amino acids
XXXXXXXXXXXXXXXXX

SEQ ID NO: 787 - protein, 18 aa, Artificial
  Completely synthesized peptide construct
  MISC_FEATURE (1)..(1): X is acetyl or propionyl group, D glycine or D alanine, cyclohexylalanine at amino terminus
  MISC_FEATURE (2)..(2): X is K, R or H for basic amino acids
  MISC_FEATURE (3)..(3): X is D and E for acidic amino acids
  MISC_FEATURE (4)..(4): X is A and G
  MISC_FEATURE (5)..(5): X is GabaX for X2X3 or X3X2 or X2X3 or X3X2 or X3X3 or X2X2
  MISC_FEATURE (6)..(6): X is T or S
  MISC_FEATURE (7)..(7): X is T or S
  MISC_FEATURE (8)..(8): X is I, L or V
  MISC_FEATURE (9)..(9): X is T or S
  MISC_FEATURE (10)..(10): X is K, R or H for basic amino acids
  MISC_FEATURE (11)..(11): X is A and G
  MISC_FEATURE (12)..(12): X is K, R or H for basic amino acids
  MISC_FEATURE (13)..(13): X is I, L or V
  MISC_FEATURE (14)..(14): X is T or S
  MISC_FEATURE (15)..(15): X is F, W or Y for aromatic amino acids
  MISC_FEATURE (16)..(16): X is T or S
  MISC_FEATURE (17)..(17): X is N or Q for amidated amino acids
  MISC_FEATURE (18)..(18): X is N or Q for amidated amino acids
XXXXXXXXXXXXXXXXXX

SEQ ID NO: 788 - protein, 18 aa, Artificial
  Completely synthesized peptide construct
SERVQLLHSQNTSLINQK

SEQ ID NO: 789 - protein, 18 aa, Artificial
  Completely synthesized peptide construct
  MISC_FEATURE (1)..(1): X is T or S
  MISC_FEATURE (2)..(2): X is D and E for acidic amino acids
  MISC_FEATURE (3)..(3): X is K, R or H for basic amino acids
  MISC_FEATURE (4)..(4): X is I, L or V
  MISC_FEATURE (5)..(5): X is N or Q for amidated amino acids
  MISC_FEATURE (6)..(6): X is I, L or V
  MISC_FEATURE (7)..(7): X is I, L or V
  MISC_FEATURE (8)..(8): X is K, R or H for basic amino acids
  MISC_FEATURE (9)..(9): X is T or S
  MISC_FEATURE (10)..(10): X is N or Q for amidated amino acids
  MISC_FEATURE (11)..(11): X is N or Q for amidated amino acids
  MISC_FEATURE (12)..(12): X is T or S
  MISC_FEATURE (13)..(13): X is T or S
  MISC_FEATURE (14)..(14): X is I, L or V
  MISC_FEATURE (15)..(15): X is I, L or V
  MISC_FEATURE (16)..(16): X is T or S
  MISC_FEATURE (17)..(17): X is T or S
  MISC_FEATURE (18)..(18): X is K, R or H for basic amino acids
XXXXXXXXXXXXXXXXXX

SEQ ID NO: 790 - protein, 18 aa, Artificial
  Completely synthesized peptide construct
  MISC_FEATURE (1)..(1): X is T or S
  MISC_FEATURE (2)..(2): X is D and E for acidic amino acids
  MISC_FEATURE (3)..(3): X is K, R or H for basic amino acids
  MISC_FEATURE (4)..(4): X is I, L or V
  MISC_FEATURE (5)..(5): X is N or Q for amidated amino acids
  MISC_FEATURE (6)..(6): X is I, L or V
  MISC_FEATURE (7)..(7): X is I, L or V
  MISC_FEATURE (8)..(8): X is K, R or H for basic amino acids
  MISC_FEATURE (9)..(9): X is T or S
  MISC_FEATURE (10)..(10): X is N or Q for amidated amino acids
  MISC_FEATURE (11)..(11): X is N or Q for amidated amino acids
  MISC_FEATURE (12)..(12): X is T or S
  MISC_FEATURE (13)..(13): X is T or S
  MISC_FEATURE (14)..(14): X is I, L or V
  MISC_FEATURE (15)..(15): X is I, L or V
  MISC_FEATURE (16)..(16): X is T or S
  MISC_FEATURE (17)..(17): X is T or S
  MISC_FEATURE (18)..(18): X is K, R or H for basic amino acids
XXXXXXXXXXXXXXXXXX

SEQ ID NO: 791 - protein, 19 aa, Artificial
  Completely synthesized peptide construct
  MISC_FEATURE (1)..(1): X is acetyl or propionyl group, D glycine or D alanine, cyclohexylalanine at amino terminus
  MISC_FEATURE (2)..(2): X is T or S
  MISC_FEATURE (3)..(3): X is D and E for acidic amino acids
  MISC_FEATURE (4)..(4): X is K, R or H for basic amino acids
  MISC_FEATURE (5)..(5): X is I, L or V
  MISC_FEATURE (6)..(6): X is N or Q for amidated amino acids
  MISC_FEATURE (7)..(7): X is I, L or V
  MISC_FEATURE (8)..(8): X is I, L or V
  MISC_FEATURE (9)..(9): X is K, R or H for basic amino acids
  MISC_FEATURE (10)..(10): X is T or S
  MISC_FEATURE (11)..(11): X is N or Q for amidated amino acids
  MISC_FEATURE (12)..(12): X is N or Q for amidated amino acids
  MISC_FEATURE (13)..(13): X is T or S
  MISC_FEATURE (14)..(14): X is T or S
  MISC_FEATURE (15)..(15): X is I, L or V
  MISC_FEATURE (16)..(16): X is I, L or V
  MISC_FEATURE (17)..(17): X is T or S
  MISC_FEATURE (18)..(18): X is T or S
  MISC_FEATURE (19)..(19): X is K, R or H for basic amino acids
XXXXXXXXXXXXXXXXXXX

SEQ ID NO: 792 - protein, 17 aa, Artificial
  Completely synthesized peptide construct
  MISC_FEATURE (1)..(1): X is acetyl or propionyl group, D glycine or D alanine, cyclohexylalanine at amino terminus
  MISC_FEATURE (2)..(2): X is T or S
  MISC_FEATURE (3)..(3): X is D and E for acidic amino acids
  MISC_FEATURE (4)..(4): X is K, R or H for basic amino acids
  MISC_FEATURE (5)..(5): X is I, L or V
  MISC_FEATURE (6)..(6): X is N or Q for amidated amino acids
  MISC_FEATURE (7)..(7): X is GabaX for X2X3 or X3X2 or X2X3 or X3X2 or X3X3 or X2X2
  MISC_FEATURE (8)..(8): X is K, R or H for basic amino acids
  MISC_FEATURE (9)..(9): X is T or S
  MISC_FEATURE (10)..(10): X is N or Q for amidated amino acids
  MISC_FEATURE (11)..(11): X is N or Q for amidated amino acids
  MISC_FEATURE (12)..(12): X is T or S
  MISC_FEATURE (13)..(13): X is T or S
  MISC_FEATURE (14)..(14): X is GabaX for X2X3 or X3X2 or X2X3 or X3X2 or X3X3 or X2X2
  MISC_FEATURE (15)..(15): X is T or S
  MISC_FEATURE (16)..(16): X is T or S
  MISC_FEATURE (17)..(17): X is K, R or H for basic amino acids
XXXXXXXXXXXXXXXXX

SEQ ID NO: 793 - protein, 18 aa, Artificial
  Completely synthesized peptide construct
  MISC_FEATURE (1)..(1): X is D and E for acidic amino acids
  MISC_FEATURE (2)..(2): X is A and G
  MISC_FEATURE (3)..(3): X is N or Q for amidated amino acids
  MISC_FEATURE (4)..(4): X is D and E for acidic amino acids
  MISC_FEATURE (5)..(5): X is D and E for acidic amino acids
  MISC_FEATURE (6)..(6): X is K, R or H for basic amino acids
  MISC_FEATURE (7)..(7): X is A and G
  MISC_FEATURE (8)..(8): X is A and G
  MISC_FEATURE (9)..(9): X is I, L or V
  MISC_FEATURE (10)..(10): X is I, L or V
  MISC_FEATURE (11)..(11): X is C or S
  MISC_FEATURE (12)..(12): X is T or S
  MISC_FEATURE (13)..(13): X is A and G
  MISC_FEATURE (14)..(14): X is I, L or V
  MISC_FEATURE (15)..(15): X is I, L or V
  MISC_FEATURE (16)..(16): X is A and G
  MISC_FEATURE (17)..(17): X is A and G
  MISC_FEATURE (18)..(18): X is A and G
XXXXXXXXXXXXXXXXXX

SEQ ID NO: 794 - protein, 19 aa, Artificial
  Completely synthesized peptide construct
  MISC_FEATURE (1)..(1): X is acetyl or propionyl group, D glycine or D alanine, cyclohexylalanine at amino terminus
  MISC_FEATURE (2)..(2): X is D and E for acidic amino acids
  MISC_FEATURE (3)..(3): X is A and G
  MISC_FEATURE (4)..(4): X is N or Q for amidated amino acids
  MISC_FEATURE (5)..(5): X is D and E for acidic amino acids
  MISC_FEATURE (6)..(6): X is D and E for acidic amino acids
  MISC_FEATURE (7)..(7): X is K, R or H for basic amino acids
  MISC_FEATURE (8)..(8): X is A and G
  MISC_FEATURE (9)..(9): X is A and G
  MISC_FEATURE (10)..(10): X is I, L or V
  MISC_FEATURE (11)..(11): X is I, L or V
  MISC_FEATURE (12)..(12): X is C or S
  MISC_FEATURE (13)..(13): X is T or S
  MISC_FEATURE (14)..(14): X is A and G
  MISC_FEATURE (15)..(15): X is I, L or V
  MISC_FEATURE (16)..(16): X is I, L or V
  MISC_FEATURE (17)..(17): X is A and G
  MISC_FEATURE (18)..(18): X is A and G
  MISC_FEATURE (19)..(19): X is A and G
XXXXXXXXXXXXXXXXXXX

SEQ ID NO: 795 - protein, 16 aa, Artificial
  Completely synthesized peptide construct
  MISC_FEATURE (1)..(1): X is acetyl or propionyl group, D glycine or D alanine, cyclohexylalanine at amino terminus
  MISC_FEATURE (2)..(2): X is D and E for acidic amino acids
  MISC_FEATURE (3)..(3): X is A and G
  MISC_FEATURE (4)..(4): X is N or Q for amidated amino acids
  MISC_FEATURE (5)..(5): X is GabaX for X2X3 or X3X2 or X2X3 or X3X2 or X3X3 or X2X2
  MISC_FEATURE (6)..(6): X is K, R or H for basic amino acids
  MISC_FEATURE (7)..(7): X is A and G
  MISC_FEATURE (8)..(8): X is A and G
  MISC_FEATURE (9)..(9): X is GabaX for X2X3 or X3X2 or X2X3 or X3X2 or X3X3 or X2X2
  MISC_FEATURE (10)..(10): X is C or S
  MISC_FEATURE (11)..(11): X is T or S
  MISC_FEATURE (12)..(12): X is A and G
  MISC_FEATURE (13)..(13): X is GabaX for X2X3 or X3X2 or X2X3 or X3X2 or X3X3 or X2X2
  MISC_FEATURE (14)..(14): X is A and G
  MISC_FEATURE (15)..(15): X is A and G
  MISC_FEATURE (16)..(16): X is A and G
XXXXXXXXXXXXXXXX

SEQ ID NO: 796 - protein, 70 aa, Homo sapiens [sequence omitted]

SEQ ID NO: 797 - protein, 18 aa, Homo sapiens [sequence omitted]

SEQ ID NO: 798 - protein, 108 aa, Homo sapiens
KKPGESLKISCQGSGYNFNTYYIAWVRHMPGYGLEWMGIIYPDDSTIRYSPSFQGQVTISADKSTTTAYLQWNSLKASDTAMYYCARRVASALSYWYFDLWGQGTLVT

SEQ ID NO: 799 - protein, 93 aa, Homo sapiens [sequence omitted]

SEQ ID NO: 800 - protein, 30 aa, Artificial; identical to SEQ ID NO: 321
  Completely synthesized peptide construct

SEQ ID NO: 801 - protein, 31 aa, Artificial; identical to SEQ ID NO: 130
  Completely synthesized peptide construct
  MISC_FEATURE (1)..(1): X is D and E for acidic amino acids
  MISC_FEATURE (2)..(2): X is I, L or V
  MISC_FEATURE (3)..(3): X is I, L or V
  MISC_FEATURE (4)..(4): X is K, R or H for basic amino acids
  MISC_FEATURE (5)..(5): X is N or Q for amidated amino acids
  MISC_FEATURE (6)..(6): X is A and G
  MISC_FEATURE (7)..(7): X is D and E for acidic amino acids
  MISC_FEATURE (8)..(8): X is K, R or H for basic amino acids
  MISC_FEATURE (9)..(9): X is I, L or V
  MISC_FEATURE (10)..(10): X is D and E for acidic amino acids
  MISC_FEATURE (11)..(11): X is K, R or H for basic amino acids
  MISC_FEATURE (12)..(12): X is I, L or V
  MISC_FEATURE (13)..(13): X is D and E for acidic amino acids
  MISC_FEATURE (14)..(14): X is A and G
  MISC_FEATURE (15)..(15): X is A and G
  MISC_FEATURE (16)..(16): X is A and G
  MISC_FEATURE (17)..(17): X is acetyl or propionyl group, D glycine or D alanine, cyclohexylalanine at amino terminus
  MISC_FEATURE (18)..(18): X is C or S
  MISC_FEATURE (19)..(19): X is I, L or V
  MISC_FEATURE (20)..(20): X is K, R or H for basic amino acids
  MISC_FEATURE (21)..(21): X is I, L or V
  MISC_FEATURE (22)..(22): X is M or Nle (Norleucine)
  MISC_FEATURE (23)..(23): X is A and G
  MISC_FEATURE (24)..(24): X is T or S
  MISC_FEATURE (25)..(25): X is I, L or V
  MISC_FEATURE (26)..(26): X is F or P
  MISC_FEATURE (27)..(27): X is C or S
  MISC_FEATURE (28)..(28): X is C or S
  MISC_FEATURE (29)..(29): X is F, W or Y for aromatic amino acids
  MISC_FEATURE (30)..(30): X is A and G
  MISC_FEATURE (31)..(31): X is T or S

SEQ ID NO: 802 - protein, 33 aa, Artificial
  Completely synthesized peptide construct
DGQEEKAGVVSTGLIGGGDGQEEKAGVVSTGLI

SEQ ID NO: 803 - protein, 32 aa, Artificial; identical to SEQ ID NO: 160
  Completely synthesized peptide construct
  MISC_FEATURE (1)..(1): X is acetyl or propionyl group, D glycine or D alanine, cyclohexylalanine at amino terminus
  MISC_FEATURE (2)..(2): X is D and E for acidic amino acids
  MISC_FEATURE (3)..(3): X is A and G
  MISC_FEATURE (4)..(4): X is N or Q for amidated amino acids
  MISC_FEATURE (5)..(5): X is GabaX for X2X3 or X3X2 or X2X3 or X3X2 or X3X3 or X2X2
  MISC_FEATURE (6)..(6): X is K, R or H for basic amino acids
  MISC_FEATURE (7)..(7): X is A and G
  MISC_FEATURE (8)..(8): X is A and G
  MISC_FEATURE (9)..(9): X is GabaX for X2X3 or X3X2 or X2X3 or X3X2 or X3X3 or X2X2
  MISC_FEATURE (10)..(10): X is C or S
  MISC_FEATURE (11)..(11): X is T or S
  MISC_FEATURE (12)..(12): X is A and G
  MISC_FEATURE (13)..(13): X is GabaX for X2X3 or X3X2 or X2X3 or X3X2 or X3X3 or X2X2
  MISC_FEATURE (14)..(14): X is A and G
  MISC_FEATURE (15)..(15): X is A and G
  MISC_FEATURE (16)..(16): X is A and G
  MISC_FEATURE (17)..(17): X is A and G
  MISC_FEATURE (18)..(18): X is acetyl or propionyl group, D glycine or D alanine, cyclohexylalanine at amino terminus
  MISC_FEATURE (19)..(19): X is C or S
  MISC_FEATURE (20)..(20): X is K, R or H for basic amino acids
  MISC_FEATURE (21)..(21): X is I, L or V
  MISC_FEATURE (22)..(22): X is I, L or V
  MISC_FEATURE (23)..(23): X is D and E for acidic amino acids
  MISC_FEATURE (24)..(24): X is A and G
  MISC_FEATURE (25)..(25): X is I, L or V
  MISC_FEATURE (26)..(26): X is F, W or Y for aromatic amino acids
  MISC_FEATURE (27)..(27): X is I, L or V
  MISC_FEATURE (28)..(28): X is C or S
  MISC_FEATURE (29)..(29): X is A and G
  MISC_FEATURE (30)..(30): X is D and E for acidic amino acids
  MISC_FEATURE (31)..(31): X is K, R or H for basic amino acids
  MISC_FEATURE (32)..(32): X is A and G

SEQ ID NO: 804 - protein, 38 aa, Artificial
  Completely synthesized peptide construct
DGQEEKAGVVSTGLIGGGDGEAGKPGKAGERGPPGPQG

SEQ ID NO: 805 - protein, 37 aa, Artificial; identical to SEQ ID NO: 158
  Completely synthesized peptide construct
  MISC_FEATURE (1)..(1): X is acetyl or propionyl group, D glycine or D alanine, cyclohexylalanine at amino terminus
  MISC_FEATURE (2)..(2): X is D and E for acidic amino acids
  MISC_FEATURE (3)..(3): X is A and G
  MISC_FEATURE (4)..(4): X is N or Q for amidated amino acids
  MISC_FEATURE (5)..(5): X is GabaX for X2X3 or X3X2 or X2X3 or X3X2 or X3X3 or X2X2
  MISC_FEATURE (6)..(6): X is K, R or H for basic amino acids
  MISC_FEATURE (7)..(7): X is A and G
  MISC_FEATURE (8)..(8): X is A and G
  MISC_FEATURE (9)..(9): X is GabaX for X2X3 or X3X2 or X2X3 or X3X2 or X3X3 or X2X2
  MISC_FEATURE (10)..(10): X is C or S
  MISC_FEATURE (11)..(11): X is T or S
  MISC_FEATURE (12)..(12): X is A and G
  MISC_FEATURE (13)..(13): X is GabaX for X2X3 or X3X2 or X2X3 or X3X2 or X3X3 or X2X2
  MISC_FEATURE (14)..(14): X is A and G
  MISC_FEATURE (15)..(15): X is A and G
  MISC_FEATURE (16)..(16): X is A and G
  MISC_FEATURE (17)..(17): X is A and G
  MISC_FEATURE (18)..(18): X is D and E for acidic amino acids
  MISC_FEATURE (19)..(19): X is A and G
  MISC_FEATURE (20)..(20): X is D and E for acidic amino acids
  MISC_FEATURE (21)..(21): X is A and G
  MISC_FEATURE (22)..(22): X is A and G
  MISC_FEATURE (23)..(23): X is K, R or H for basic amino acids
  MISC_FEATURE (24)..(24): X is F or P
  MISC_FEATURE (25)..(25): X is A and G
  MISC_FEATURE (26)..(26): X is K, R or H for basic amino acids
  MISC_FEATURE (27)..(27): X is A and G
  MISC_FEATURE (28)..(28): X is A and G
  MISC_FEATURE (29)..(29): X is D and E for acidic amino acids
  MISC_FEATURE (30)..(30): X is K, R or H for basic amino acids
  MISC_FEATURE (31)..(31): X is A and G
  MISC_FEATURE (32)..(32): X is F or P
  MISC_FEATURE (33)..(33): X is F or P
  MISC_FEATURE (34)..(34): X is A and G
  MISC_FEATURE (35)..(35): X is F or P
  MISC_FEATURE (36)..(36): X is N or Q for amidated amino acids
  MISC_FEATURE (37)..(37): X is A and G

SEQ ID NO: 806 - protein, 33 aa, Artificial
  Completely synthesized peptide construct
DLLKNGERIEKVEGGGSVKLSIAVKNKAEFHQS

SEQ ID NO: 807 - protein, 33 aa, Artificial; identical to SEQ ID NO: 99
  Completely synthesized peptide construct
  MISC_FEATURE (1)..(1): X is D and E for acidic amino acids
  MISC_FEATURE (2)..(2): X is I, L or V
  MISC_FEATURE (3)..(3): X is I, L or V
  MISC_FEATURE (4)..(4): X is K, R or H for basic amino acids
  MISC_FEATURE (5)..(5): X is N or Q for amidated amino acids
  MISC_FEATURE (6)..(6): X is A and G
  MISC_FEATURE (7)..(7): X is D and E for acidic amino acids
  MISC_FEATURE (8)..(8): X is K, R or H for basic amino acids
  MISC_FEATURE (9)..(9): X is I, L or V
  MISC_FEATURE (10)..(10): X is D and E for acidic amino acids
  MISC_FEATURE (11)..(11): X is K, R or H for basic amino acids
  MISC_FEATURE (12)..(12): X is I, L or V
  MISC_FEATURE (13)..(13): X is D and E for acidic amino acids
  MISC_FEATURE (14)..(14): X is A and G
  MISC_FEATURE (15)..(15): X is A and G
  MISC_FEATURE (16)..(16): X is A and G
  MISC_FEATURE (17)..(17): X is T or S
  MISC_FEATURE (18)..(18): X is I, L or V
  MISC_FEATURE (19)..(19): X is K, R or H for basic amino acids
  MISC_FEATURE (20)..(20): X is I, L or V
  MISC_FEATURE (21)..(21): X is T or S
  MISC_FEATURE (22)..(22): X is I, L or V
  MISC_FEATURE (23)..(23): X is A and G
  MISC_FEATURE (24)..(24): X is I, L or V
  MISC_FEATURE (25)..(25): X is K, R or H for basic amino acids
  MISC_FEATURE (26)..(26): X is N or Q for amidated amino acids
  MISC_FEATURE (27)..(27): X is K, R or H for basic amino acids
  MISC_FEATURE (28)..(28): X is A and G
  MISC_FEATURE (29)..(29): X is D and E for acidic amino acids
  MISC_FEATURE (30)..(30): X is F or P
  MISC_FEATURE (31)..(31): X is K, R or H for basic amino acids
  MISC_FEATURE (32)..(32): X is N or Q for amidated amino acids
  MISC_FEATURE (33)..(33): X is T or S

SEQ ID NO: 808 - protein, 33 aa, Artificial
  Completely synthesized peptide construct
DLLKNGERIEKVEGGGNVREGIAFRPASKTFTV

SEQ ID NO: 809 - protein, 33 aa, Artificial; identical to SEQ ID NO: 99
  Completely synthesized peptide construct
  MISC_FEATURE (1)..(1): X is D and E for acidic amino acids
  MISC_FEATURE (2)..(2): X is I, L or V
  MISC_FEATURE (3)..(3): X is I, L or V
  MISC_FEATURE (4)..(4): X is K, R or H for basic amino acids
  MISC_FEATURE (5)..(5): X is N or Q for amidated amino acids
  MISC_FEATURE (6)..(6): X is A and G
  MISC_FEATURE (7)..(7): X is D and E for acidic amino acids
  MISC_FEATURE (8)..(8): X is K, R or H for basic amino acids
  MISC_FEATURE (9)..(9): X is I, L or V
  MISC_FEATURE (10)..(10): X is D and E for acidic amino acids
  MISC_FEATURE (11)..(11): X is K, R or H for basic amino acids
  MISC_FEATURE (12)..(12): X is I, L or V
  MISC_FEATURE (13)..(13): X is D and E for acidic amino acids
  MISC_FEATURE (14)..(14): X is A and G
  MISC_FEATURE (15)..(15): X is A and G
  MISC_FEATURE (16)..(16): X is A and G
  MISC_FEATURE (17)..(17): X is  N or Q for amidated amino acids
  MISC_FEATURE (18)..(18): X is I, L or V
  MISC_FEATURE (19)..(19): X is K, R or H for basic amino acids
  MISC_FEATURE (20)..(20): X is D and E for acidic amino acids
  MISC_FEATURE (21)..(21): X is A and G
  MISC_FEATURE (22)..(22): X is I, L or V
  MISC_FEATURE (23)..(23): X is A and G
  MISC_FEATURE (24)..(24): X is F or P
  MISC_FEATURE (25)..(25): X is K, R or H for basic amino acids
  MISC_FEATURE (26)..(26): X is F or P
  MISC_FEATURE (27)..(27): X is A and G
  MISC_FEATURE (28)..(28): X is T or S
  MISC_FEATURE (29)..(29): X is K, R or H for basic amino acids
  MISC_FEATURE (30)..(30): X is T or S
  MISC_FEATURE (31)..(31): X is F or P
  MISC_FEATURE (32)..(32): X is T or S
  MISC_FEATURE (33)..(33): X is I, L or V

SEQ ID NO: 810 - protein, 36 aa, Artificial
  Completely synthesized peptide construct
DLLKNGERIEKVEGGGGPTHLFQPSLVLDMAKVLLD

SEQ ID NO: 811 - protein, 36 aa, Artificial; identical to SEQ ID NO: 172
  Completely synthesized peptide construct
  MISC_FEATURE (1)..(1): X is D and E for acidic amino acids
  MISC_FEATURE (2)..(2): X is I, L or V
  MISC_FEATURE (3)..(3): X is I, L or V
  MISC_FEATURE (4)..(4): X is K, R or H for basic amino acids
  MISC_FEATURE (5)..(5): X is N or Q for amidated amino acids
  MISC_FEATURE (6)..(6): X is A and G
  MISC_FEATURE (7)..(7): X is D and E for acidic amino acids
  MISC_FEATURE (8)..(8): X is K, R or H for basic amino acids
  MISC_FEATURE (9)..(9): X is I, L or V
  MISC_FEATURE (10)..(10): X is D and E for acidic amino acids
  MISC_FEATURE (11)..(11): X is K, R or H for basic amino acids
  MISC_FEATURE (12)..(12): X is I, L or V
  MISC_FEATURE (13)..(13): X is D and E for acidic amino acids
  MISC_FEATURE (14)..(14): X is A and G
  MISC_FEATURE (15)..(15): X is A and G
  MISC_FEATURE (16)..(16): X is A and G
  MISC_FEATURE (17)..(17): X is A and G
  MISC_FEATURE (18)..(18): X is F or P
  MISC_FEATURE (19)..(19): X is T or S
  MISC_FEATURE (20)..(20): X is K, R or H for basic amino acids
  MISC_FEATURE (21)..(21): X is I, L or V
  MISC_FEATURE (22)..(22): X is F, W or Y for aromatic amino acids
  MISC_FEATURE (23)..(23): X is N or Q for amidated amino acids
  MISC_FEATURE (24)..(24): X is F or P
  MISC_FEATURE (25)..(25): X is T or S
  MISC_FEATURE (26)..(26): X is I, L or V
  MISC_FEATURE (27)..(27): X is I, L or V
  MISC_FEATURE (28)..(28): X is I, L or V
  MISC_FEATURE (29)..(29): X is D and E for acidic amino acids
  MISC_FEATURE (30)..(30): X is M or Nle (Norleucine)
  MISC_FEATURE (31)..(31): X is A and G
  MISC_FEATURE (32)..(32): X is K, R or H for basic amino acids
  MISC_FEATURE (33)..(33): X is I, L or V
  MISC_FEATURE (34)..(34): X is I, L or V
  MISC_FEATURE (35)..(35): X is I, L or V
  MISC_FEATURE (36)..(36): X is D and E for acidic amino acids

SEQ ID NO: 812 - protein, 35 aa, artificial
  Completely synthesized peptide construct
DGQEEKAGVVSTGLIGGGSVKLSIAVKNKAEFHQS

SEQ ID NO: 813 - protein, 33 aa, artificial; identical to SEQ ID NO: 99
  Completely synthesized peptide construct
  MISC_FEATURE (1)..(1): X is acetyl or propionyl group, D glycine or D alanine, cyclohexylalanie at amino terminus
  MISC_FEATURE (2)..(2): X is D and E for acidic amino acids
  MISC_FEATURE (3)..(3): X is A and G
  MISC_FEATURE (4)..(4): X is N or Q for amidated amino acids
  MISC_FEATURE (5)..(5): X is GabaX for X2X3 or X3X2 or X2X3 or X3X2 or X3X3 or X2X2
  MISC_FEATURE (6)..(6): X is K, R or H for basic amino acids
  MISC_FEATURE (7)..(7): X is A and G
  MISC_FEATURE (8)..(8): X is A and G
  MISC_FEATURE (9)..(9): X is GabaX for X2X3 or X3X2 or X2X3 or X3X2 or X3X3 or X2X2
  MISC_FEATURE (10)..(10): X is C or S
  MISC_FEATURE (11)..(11): X is T or S
  MISC_FEATURE (12)..(12): X is A and G
  MISC_FEATURE (13)..(13): X is GabaX for X2X3 or X3X2 or X2X3 or X3X2 or X3X3 or X2X2
  MISC_FEATURE (14)..(14): X is A and G
  MISC_FEATURE (15)..(15): X is A and G
  MISC_FEATURE (16)..(16): X is A and G
  MISC_FEATURE (17)..(17): X is T or S
  MISC_FEATURE (18)..(18): X is I, L or V
  MISC_FEATURE (19)..(19): X is K, R or H for basic amino acids
  MISC_FEATURE (20)..(20): X is I, L or V
  MISC_FEATURE (21)..(21): X is T or S
  MISC_FEATURE (22)..(22): X is I, L or V
  MISC_FEATURE (23)..(23): X is A and G
  MISC_FEATURE (24)..(24): X is I, L or V
  MISC_FEATURE (25)..(25): X is K, R or H for basic amino acids
  MISC_FEATURE (26)..(26): X is N or Q for amidated amino acids
  MISC_FEATURE (27)..(27): X is K, R or H for basic amino acids
  MISC_FEATURE (28)..(28): X is A and G
  MISC_FEATURE (29)..(29): X is D and E for acidic amino acids
  MISC_FEATURE (30)..(30): X is F or P
  MISC_FEATURE (31)..(31): X is K, R or H for basic amino acids
  MISC_FEATURE (32)..(32): X is N or Q for amidated amino acids
  MISC_FEATURE (33)..(33): X is T or S

SEQ ID NO: 814 - protein, 35 aa, artificial
  Completely synthesized peptide construct
DGQEEKAGVVSTGLIGGGNVREGIAFRPASKTFTV

SEQ ID NO: 815 - protein, 33 aa, artificial; identical to SEQ ID NO: 99
  Completely synthesized peptide construct
  MISC_FEATURE (1)..(1): X is acetyl or propiionyl group, D glycine or D alanine, cyclohexylalanine at amino terminus
  MISC_FEATURE (2)..(2): X is D and E for acidic amino acids
  MISC_FEATURE (3)..(3): X is A and G
  MISC_FEATURE (4)..(4): X is N or Q for amidated amino acids
  MISC_FEATURE (5)..(5): X is GabaX for X2X3 or X3X2 or X2X3 or X3X2 or X3X3 or X2X2
  MISC_FEATURE (6)..(6): X is K, R or H for basic amino acids
  MISC_FEATURE (7)..(7): X is A and G
  MISC_FEATURE (8)..(8): X is A and G
  MISC_FEATURE (9)..(9): X is GabaX for X2X3 or X3X2 or X2X3 or X2X2 or X3X3 or X2X2
  MISC_FEATURE (10)..(10): X is C or S
  MISC_FEATURE (11)..(11): X is T or S
  MISC_FEATURE (12)..(12): X is A and G
  MISC_FEATURE (13)..(13): X is GabaX for X2X3 or X3X2 or X2X3 or X3X2 or X3X3 or X2X2
  MISC_FEATURE (14)..(14): X is A and G
  MISC_FEATURE (15)..(15): X is A and G
  MISC_FEATURE (16)..(16): X is A and G
  MISC_FEATURE (17)..(17): X is T or S
  MISC_FEATURE (18)..(18): X is I, L or V
  MISC_FEATURE (19)..(19): X is K, R or H for basic amino acids
  MISC_FEATURE (20)..(20): X is I, L or V
  MISC_FEATURE (21)..(21): X is T or S
  MISC_FEATURE (22)..(22): X is I, L or V
  MISC_FEATURE (23)..(23): X is A and G
  MISC_FEATURE (24)..(24): X is I, L or V
  MISC_FEATURE (25)..(25): X is K, R or H for basic amino acids
  MISC_FEATURE (26)..(26): X is N or Q for amidated amino acids
  MISC_FEATURE (27)..(27): X is K, R or H for basic amino acids
  MISC_FEATURE (28)..(28): X is A and G
  MISC_FEATURE (29)..(29): X is D and E for acidic amino acids
  MISC_FEATURE (30)..(30): X is F or P
  MISC_FEATURE (31)..(31): X is K, R or H for basic amino acids
  MISC_FEATURE (32)..(32): X is N or Q for amidated amino acids
  MISC_FEATURE (33)..(33): X is T or S

SEQ ID NO: 816 - protein, 38 aa, artificial
  Completely synthesized peptide construct
DGQEEKAGVVSTGLIGGGGPTHLFQPSLVLDMAKVLLD

SEQ ID NO: 817 - protein, 36 aa, artificial; identical to SEQ ID NO: 172
  Completely synthesized peptide construct
  MISC_FEATURE (1)..(1): X is acetyl or propionyl group, D glycine or D alanine, cyclohexylalanine at amino terminus
  MISC_FEATURE (2)..(2): X is D and E for acidic amino acids
  MISC_FEATURE (3)..(3): X is A and G
  MISC_FEATURE (4)..(4): X is N or Q for amidated amino acids
  MISC_FEATURE (5)..(5): X is GabaX for X2X3 or X3X2 or X2X3 or X3X2 or X3X3 or X2X2
  MISC_FEATURE (6)..(6): X is K, R or H for basic amino acids
  MISC_FEATURE (7)..(7): X is A and G
  MISC_FEATURE (8)..(8): X is A and G
  MISC_FEATURE (9)..(9): X is GabaX for X2X3 or X3X2 or X2X3 or X3X2 or X3X3 or X2X2
  MISC_FEATURE (10)..(10): X is C or S
  MISC_FEATURE (11)..(11): X is T or S
  MISC_FEATURE (12)..(12): X is A and G
  MISC_FEATURE (13)..(13): X is GabaX for X2X3 or X3X2 or X2X3 or X3X2 or X3X3 or X2X2
  MISC_FEATURE (14)..(14): X is A and G
  MISC_FEATURE (15)..(15): X is A and G
  MISC_FEATURE (16)..(16): X is A and G
  MISC_FEATURE (17)..(17): X is A and G
  MISC_FEATURE (18)..(18): X is F or P
  MISC_FEATURE (19)..(19): X is T or S
  MISC_FEATURE (20)..(20): X is K, R or H for basic amino acids
  MISC_FEATURE (21)..(21): X is I, L or V
  MISC_FEATURE (22)..(22): X is F, W or Y for aromatic amino acids
  MISC_FEATURE (23)..(23): X is N or Q for amidated amino acids
  MISC_FEATURE (24)..(24): X is F or P
  MISC_FEATURE (25)..(25): X is T or S
  MISC_FEATURE (26)..(26): X is I, L or V
  MISC_FEATURE (27)..(27): X is I, L or V
  MISC_FEATURE (28)..(28): X is I, L or V
  MISC_FEATURE (29)..(29): x is D and E for acidic amino acids
  MISC_FEATURE (30)..(30): X is M or Nle (Norleucine)
  MISC_FEATURE (31)..(31): X is A and G
  MISC_FEATURE (32)..(32): X is K, R or H for basic amino acids
  MISC_FEATURE (33)..(33): X is I, L or V
  MISC_FEATURE (34)..(34): X is I, L or V
  MISC_FEATURE (35)..(35): X is I, L or V
  MISC_FEATURE (36)..(36): X is D and E for acidic amino acids

SEQ ID NO: 818 - protein, 23 aa, artificial
  Completely synthesized peptide construct
VQGEESNDKGGGNITEIADLTQK

SEQ ID NO: 819 - protein, 23 aa, artificial
  Completely synthesized peptide construct
  MISC_FEATURE (1)..(1): X is I, L or V
  MISC_FEATURE (2)..(2): X is N or Q for amidated amino acids
  MISC_FEATURE (3)..(3): X is A and G
  MISC_FEATURE (4)..(4): X is D and E for acidic amino acids
  MISC_FEATURE (5)..(5): X is D and E for acidic amino acids
  MISC_FEATURE (6)..(6): X is C or S
  MISC_FEATURE (7)..(7): X is N or Q for amidated amino acids
  MISC_FEATURE (8)..(8): X is D and E for acidic amino acids
  MISC_FEATURE (9)..(9): X is K, R or H for basic amino acids
  MISC_FEATURE (10)..(10): X is A and G
  MISC_FEATURE (11)..(11): X is A and G
  MISC_FEATURE (12)..(12): X is A and G
  MISC_FEATURE (13)..(13): X is N or Q for amidated amino acids
  MISC_FEATURE (14)..(14): X is I, L or V
  MISC_FEATURE (15)..(15): X is T or S
  MISC_FEATURE (16)..(16): X is D and E for acidic amino acids
  MISC_FEATURE (17)..(17): X is I, L or V
  MISC_FEATURE (18)..(18): X is A and G
  MISC_FEATURE (19)..(19): X is D and E for acidic amino acids
  MISC_FEATURE (20)..(20): X is I, L or V
  MISC_FEATURE (21)..(21): X is T or S
  MISC_FEATURE (22)..(22): X is N or Q for amidated amino acids
  MISC_FEATURE (23)..(23): X is K, R or H for basic amino acids
XXXXXXXXXXXXXXXXXXXXXXX

SEQ ID NO: 820 - protein, 27 aa, artificial
  Completely synthesized peptide construct
DLLKNGERIEKVEGGGNITEIADLTQK

SEQ ID NO: 821 - protein, 24 aa, artificial
  Completely synthesized peptide construct
  MISC_FEATURE (1)..(1): X is acetyl or propionyl group, D glycine or D alanine, cyclohexylalanine at amino terminus
  MISC_FEATURE (2)..(2): X is GabaX for X2X3 or X3X2 or X2X3 or X3X2 or X3X3 or X2X2
  MISC_FEATURE (3)..(3): X is K, R or H for basic amino acids
  MISC_FEATURE (4)..(4): X is N or Q for amidated amino acids
  MISC_FEATURE (5)..(5): X is A and G
  MISC_FEATURE (6)..(6): X is D and E for acidic amino acids
  MISC_FEATURE (7)..(7): X is K, R or H for basic amino acids
  MISC_FEATURE (8)..(8): X is GabaX for X2X3 or X3X2 or X2X3 or X3X2 or X3 X3 or X2X2
  MISC_FEATURE (9)..(9): X is K, R or H for basic amino acids
  MISC_FEATURE (10)..(10): X is GabaX for X2X3 or X3X2 or X2X3 or X3X2 or X3X3 or X2X2
  MISC_FEATURE (11)..(11): X is A and G
  MISC_FEATURE (12)..(12): X is A and G
  MISC_FEATURE (13)..(13): X is A and G
  MISC_FEATURE (14)..(14): X is N or Q for amidated amino acids
  MISC_FEATURE (15)..(15): X is I, L or V
  MISC_FEATURE (16)..(16): X is T or S
  MISC_FEATURE (17)..(17): X is D and E for acidic amino acids
  MISC_FEATURE (18)..(18): X is I, L or V
  MISC_FEATURE (19)..(19): X is A and G
  MISC_FEATURE (20)..(20): X is D and E for acidic amino acids
  MISC_FEATURE (21)..(21): X is I, L or V
  MISC_FEATURE (22)..(22): X is T or S
  MISC_FEATURE (23)..(23): X is N or Q for amidated amino acids
  MISC_FEATURE (24)..(24): X is K, R or H for basic amino acids
XXXXXXXXXXXXXXXXXXXXXXXX

SEQ ID NO: 822 - protein, 32 aa, artificial
  Completely synthesized peptide construct
VQGEESNDKGGGGPTHLFQPSLVLDMAKVLLD

SEQ ID NO: 823 - protein, 30 aa, artificial; identical to SEQ ID NO: 58
  Completely synthesized peptide construct
  MISC_FEATURE (1)..(1): X is I, L or V
  MISC_FEATURE (2)..(2): X is N or Q for amidated amino acids
  MISC_FEATURE (3)..(3): X is A and G
  MISC_FEATURE (4)..(4): X is D and E for acidic amino acids
  MISC_FEATURE (5)..(5): X is D and E for acidic amino acids
  MISC_FEATURE (6)..(6): X is C or S
  MISC_FEATURE (7)..(7): X is N or Q for amidated amino acids
  MISC_FEATURE (8)..(8): X is D and E for acidic amino acids
  MISC_FEATURE (9)..(9): X is K, R or H for basic amino acids
  MISC_FEATURE (10)..(10): X is A and G
  MISC_FEATURE (11)..(11): X is A and G
  MISC_FEATURE (12)..(12): X is A and G
  MISC_FEATURE (13)..(13): X is A and G
  MISC_FEATURE (14)..(14): X is F or P
  MISC_FEATURE (15)..(15): X is T or S
  MISC_FEATURE (16)..(16): X is K, R or H for basic amino acids
  MISC_FEATURE (17)..(17): X is I, L or V
  MISC_FEATURE (18)..(18): X is F, W or Y for aromatic amino acids
  MISC_FEATURE (19)..(19): X is N or Q for amidated amino acids
  MISC_FEATURE (20)..(20): X is F or P
  MISC_FEATURE (21)..(21): X is T or S
  MISC_FEATURE (22)..(22): X is I, L or V
  MISC_FEATURE (23)..(23): X is I, L or V
  MISC_FEATURE (24)..(24): X is I, L or V
  MISC_FEATURE (25)..(25): X is D and E for acidic amino acids
  MISC_FEATURE (26)..(26): X is M or Nle (Norleucine)
  MISC_FEATURE (27)..(27): X is A and G
  MISC_FEATURE (28)..(28): X is K, R or H for basic amino acids
  MISC_FEATURE (29)..(29): X is 5-aminopentanoic acid for replacement of 3 or 4 amino acids of X2 or X3
  MISC_FEATURE (30)..(30): X is D and E for acidic amino acids

SEQ ID NO: 824 - protein, 31 aa, artificial
  Completely synthesized peptide construct
DLLKNGERIEKVEGGGDGQEEKAGVVSTGLI

SEQ ID NO: 825 - protein, 24 aa, artificial
  Completely synthesized peptide construct
  MISC_FEATURE (1)..(1): X is acetyl or propionyl group, D glycine or D alanine, cyclohexylalanine at amino terminus
  MISC_FEATURE (2)..(2): X is GabaX for X2X3 or X3X2 or X2X3 or X3X2 or X3X3 or X2X2
  MISC_FEATURE (3)..(3): X is K, R or H for basic amino acids
  MISC_FEATURE (4)..(4): X is N or Q for amidated amino acids
  MISC_FEATURE (5)..(5): X is A and G
  MISC_FEATURE (6)..(6): X is D and E for acidic amino acids
  MISC_FEATURE (7)..(7): X is K, R or H for basic amino acids
  MISC_FEATURE (8)..(8): X is GabaX for X2X3 or X3X2 or X2X3 or X3X2 or X3X3 or X2X2
  MISC_FEATURE (9)..(9): X is K, R or H for basic amino acids
  MISC_FEATURE (10)..(10): X is GabaX for X2X3 or X3X2 or X2X3 or X3X2 or X3X3 or X2X2
  MISC_FEATURE (11)..(11): X is A and G
  MISC_FEATURE (12)..(12): X is A and G
  MISC_FEATURE (13)..(13): X is A and G
  MISC_FEATURE (14)..(14): X is N or Q for amidated amino acids
  MISC_FEATURE (15)..(15): X is I, L or V
  MISC_FEATURE (16)..(16): X is T or S
  MISC_FEATURE (17)..(17): X is D and E for acidic amino acids
  MISC_FEATURE (18)..(18): X is I, L or V
  MISC_FEATURE (19)..(19): X is A and G
  MISC_FEATURE (20)..(20): D and E for acidic amino acids
  MISC_FEATURE (21)..(21): X is I, L or V
  MISC_FEATURE (22)..(22): X is T or S
  MISC_FEATURE (23)..(23): X is N or Q for amidated amino acids
  MISC_FEATURE (24)..(24): X is K, R or H for basic amino acids
XXXXXXXXXXXXXXXXXXXXXXXX

SEQ ID NO: 826 - protein, 27 aa, artificial
  Completely synthesized peptide construct
VQGEESNDKGGGDGQEEKAGVVSTGLI

SEQ ID NO: 827 - protein, 23 aa, artificial
  Completely synthesized peptide construct
  MISC_FEATURE (1)..(1): X is I, L or V
  MISC_FEATURE (2)..(2): X is N or Q for amidated amino acids
  MISC_FEATURE (3)..(3): X is A and G
  MISC_FEATURE (4)..(4): X is D and E for acidic amino acids
  MISC_FEATURE (5)..(5): X is D and E for acidic amino acids
  MISC_FEATURE (6)..(6): X is C or S
  MISC_FEATURE (7)..(7): X is N or Q for amidated amino acids
  MISC_FEATURE (8)..(8): X is D and E for acidic amino acids
  MISC_FEATURE (9)..(9): X is K, R or H for basic amino acids
  MISC_FEATURE (10)..(10): X is A and G
  MISC_FEATURE (11)..(11): X is A and G
  MISC_FEATURE (12)..(12): X is A and G
  MISC_FEATURE (13)..(13): X is N or Q for amidated amino acids
  MISC_FEATURE (14)..(14): X is I, L or V
  MISC_FEATURE (15)..(15): X is T or S
  MISC_FEATURE (16)..(16): X is D and E for acidic amino acids
  MISC_FEATURE (17)..(17): X is I, L or V
  MISC_FEATURE (18)..(18): X is A and G
  MISC_FEATURE (19)..(19): X is D and E for acidic amino acids
  MISC_FEATURE (20)..(20): X is I, L or V
  MISC_FEATURE (21)..(21): X is T or S
  MISC_FEATURE (22)..(22): X is N or Q for amidated amino acids
  MISC_FEATURE (23)..(23): X is K, R or H for basic amino acids
XXXXXXXXXXXXXXXXXXXXXXX

SEQ ID NO: 828 - protein, 34 aa, artificial
  Completely synthesized peptide construct
DLLKNGERIEKVEGGGSVDRSGNVHHQFQKLTLE

SEQ ID NO: 829 - protein, 121 aa, artificial
  Completely synthesized peptide construct
  MISC_FEATURE (1)..(1): X is acetyl or propionyl group, D glycine or D alanine, cyclohexylalanine at amino terminus
  MISC_FEATURE (2)..(2): X is GabaX for X2X3 or X3X2 or X2X3 or X3X2 or X3X3 or X2X2
  MISC_FEATURE (3)..(3): X is K, R or H for basic amino acids
  MISC_FEATURE (4)..(4): X is N or Q for amidated amino acids
  MISC_FEATURE (5)..(5): X is A and G
  MISC_FEATURE (6)..(6): X is D and E for acidic amino acids
  MISC_FEATURE (7)..(7): X is K, R or H for basic amino acids
  MISC_FEATURE (8)..(8): X is GabaX for X2X3 or X3X2 or X2X3 or X3X2 or X3X3 or X2X2
  MISC_FEATURE (9)..(9): X is K, R or H for basic amino acids
  MISC_FEATURE (10)..(10): X is GabaX for X2X3 or X3X2 or X2X3 or X3X2 or X3X3 or X2X2
  MISC_FEATURE (11)..(11): X is A and G
  MISC_FEATURE (12)..(12): X is A and G
  MISC_FEATURE (13)..(13): X is A and G
XXXXXXXXXXXXXKKPGESLKISCQGSGYNFNTYYIAWVRHMPGYGLEWMGIIYPDDSTIRYSPSFQGQVTISADKSTTTAYLQWNSLKASDTAMYYCARRVASALSYWYFDLWGQGTLVT

SEQ ID NO: 830 - protein, 36 aa, artificial
  Completely synthesized peptide construct
DGQEEKAGVVSTGLIGGGSVDRSGNVHHQFQKLTLE

SEQ ID NO: 831 - protein, 95 aa, artificial
  Completely synthesized peptide construct
LVWKKQKDKVAELENSEGGGLEWMGIIYPDDSTIRYSPSFQGQVTISADKSTTTAYLQWNSLKASDTAMYYCARRVASALSYWYFDLWGQGTLVT

SEQ ID NO: 832 - protein, 30 aa, artificial
  Completely synthesized peptide construct
VQGEESNDKGGGSVDRSGNVHHQFQKLTLE

SEQ ID NO: 833 - protein, 88 aa, artificial
  Completely synthesized peptide construct
  MISC_FEATURE (1)..(1): X is acetyl or propionyl group, D glycine or D alanine, cyclohexylalanine at amino terminus
  MISC_FEATURE (2)..(2): X is I, L or V
  MISC_FEATURE (3)..(3): X is N or Q for amidated amino acids
  MISC_FEATURE (4)..(4): X is A and G
  MISC_FEATURE (5)..(5): X is D and E for acidic amino acids
  MISC_FEATURE (6)..(6): X is D and E for acidic amino acids
  MISC_FEATURE (7)..(7): X is C or S
  MISC_FEATURE (8)..(8): X is N or Q for amidated amino acids
  MISC_FEATURE (9)..(9): X is D and E for acidic amino acids
  MISC_FEATURE (10)..(10): X is K, R or H for basic amino acids
  MISC_FEATURE (11)..(11): X is A and G
  MISC_FEATURE (12)..(12): X is A and G
  MISC_FEATURE (13)..(13): X is A and G
XXXXXXXXXXXXXLEWMGIIYPDDSTIRYSPSFQGQVTISADKSTTTAYLQWNSLKASDTAMYYCARRVASALSYWYFDLWGQGTLVT

SEQ ID NO: 834 - protein, 28 aa, artificial
  Completely synthesized peptide construct
DQTQDTEGGGSVDRSGNVHHQFQKLTLE

SEQ ID NO: 835 - protein, 30 aa, artificial
  Completely synthesized peptide construct
AYMTMKIRNGGGSVDRSGNVHHQFQKLTLE

SEQ ID NO: 836 - protein, 20 aa, artificial
  Completely synthesized peptide construct
TGGKPGIAGFKGEQGPKGEP

SEQ ID NO: 837 - protein, 20 aa, artificial
  Completely synthesized peptide construct
  MISC_FEATURE (1)..(1): X is T or S
  MISC_FEATURE (2)..(2): X is A and G
  MISC_FEATURE (3)..(3): X is A and G
  MISC_FEATURE (4)..(4): X is K, R or H for basic amino acids
  MISC_FEATURE (5)..(5): X is F or P
  MISC_FEATURE (6)..(6): X is A and G
  MISC_FEATURE (7)..(7): X is I, L or V
  MISC_FEATURE (8)..(8): X is A and G
  MISC_FEATURE (9)..(9): X is A and G
  MISC_FEATURE (10)..(10): X is F, W or Y for aromatic amino acids
  MISC_FEATURE (11)..(11): X is K, R or H for basic amino acids
  MISC_FEATURE (12)..(12): X is A and G
  MISC_FEATURE (13)..(13): X is D and E for acidic amino acids
  MISC_FEATURE (14)..(14): X is N or Q for amidated amino acids
  MISC_FEATURE (15)..(15): X is A and G
  MISC_FEATURE (16)..(16): X is F or P
  MISC_FEATURE (17)..(17): X is K, R or H for basic amino acids
  MISC_FEATURE (18)..(18): X is A and G
  MISC_FEATURE (19)..(19): X is D and E for acidic amino acids
  MISC_FEATURE (20)..(20): X is F or P
XXXXXXXXXXXXXXXXXXXX

SEQ ID NO: 838 - protein, 15 aa, artificial
  Completely synthesized peptide construct
  MISC_FEATURE (1)..(1): X is T or S
  MISC_FEATURE (2)..(2): X is X1X1 or X1X3 or X3X1 or X1X2 or X2X1
  MISC_FEATURE (3)..(3): X is K, R or H for basic amino acids
  MISC_FEATURE (4)..(4): X is F or P
  MISC_FEATURE (5)..(5): X is GabaX for X2X3 or X3X2 or X2X3 or X3X2 or X3X3 or X2X2
  MISC_FEATURE (5)..(5): X is Gaba for X2X3 or X3X2 or X2X3 or X3X2 or X3X3 or X2X2
  MISC_FEATURE (6)..(6): X is X1X1 or X1X3 or X3X1 or X1X2 or X2X1
  MISC_FEATURE (7)..(7): X is F, W or Y for aromatic amino acids
  MISC_FEATURE (8)..(8): X is K, R or H for basic amino acids
  MISC_FEATURE (9)..(9): X is X1X1 or X1X3 or X3X1 or X1X2 or X2X1
  MISC_FEATURE (10)..(10): X is N or Q for amidated amino acids
  MISC_FEATURE (11)..(11): X is A and G
  MISC_FEATURE (12)..(12): X is F or P
  MISC_FEATURE (13)..(13): X is K, R or H for basic amino acids
  MISC_FEATURE (14)..(14): X is X1X1 or X1X3 or X3X1 or X1X2 or X2X1
  MISC_FEATURE (15)..(15): X is F or P
XXXXXXXXXXXXXXX

SEQ ID NO: 839 - protein, 34 aa, artificial
  Completely synthesized peptide construct
PSTHVLITHTIGGGTGGKPGIAGFKGEQGPKGEP

SEQ ID NO: 840 - protein, 38 aa, artificial
  Completely synthesized peptide construct
DFLPHYKNTSLGHRPGGGTGGKPGIAGFKGEQGPKGEP

SEQ ID NO: 841 - protein, 40 aa, artificial
  Completely synthesized peptide construct
NGQEEKAGVVSTGLIGGGGSTGGKPGIAGFKGEQGPKGEP

SEQ ID NO: 842 - protein, 40 aa, artificial
  Completely synthesized peptide construct
DGQEEKAGVVSTGLIGGGGSTGGKPGIAGFKGEQGPKGEP

SEQ ID NO: 843 - protein, 38 aa, artificial
  Completely synthesized peptide construct
DGQEEKAGVVSTGLIGGGTGGKPGIAGFKGEQGPKGEP

SEQ ID NO: 844 - protein, 38 aa, artificial; identical to SEQ ID NO: 170
  Completely synthesized peptide construct
  MISC_FEATURE (1)..(1): X is D and E for acidic amino acids
  MISC_FEATURE (2)..(2): X is A and G
  MISC_FEATURE (3)..(3): X is N or Q for amidated amino acids
  MISC_FEATURE (4)..(4): X is D and E for acidic amino acids
  MISC_FEATURE (5)..(5): X is D and E for acidic amino acids
  MISC_FEATURE (6)..(6): X is K, R or H for basic amino acids
  MISC_FEATURE (7)..(7): X is A and G
  MISC_FEATURE (8)..(8): X is A and G
  MISC_FEATURE (9)..(9): X is I, L or V
  MISC_FEATURE (10)..(10): X is I, L or V
  MISC_FEATURE (11)..(11): X is C or S
  MISC_FEATURE (12)..(12): X is T or S
  MISC_FEATURE (13)..(13): X is A and G
  MISC_FEATURE (14)..(14): X is I, L or V
  MISC_FEATURE (15)..(15): X is I, L or V
  MISC_FEATURE (16)..(16): X is A and G
  MISC_FEATURE (17)..(17): X is A and G
  MISC_FEATURE (18)..(18): X is A and G
  MISC_FEATURE (19)..(19): X is T or S
  MISC_FEATURE (20)..(20): X is A and G
  MISC_FEATURE (21)..(21): X is A and G
  MISC_FEATURE (22)..(22): X is K, R or H for basic amino acids
  MISC_FEATURE (23)..(23): X is F or P
  MISC_FEATURE (24)..(24): X is A and G
  MISC_FEATURE (25)..(25): X is I, L or V
  MISC_FEATURE (26)..(26): X is A and G
  MISC_FEATURE (27)..(27): X is A and G
  MISC_FEATURE (28)..(28): X is F, W or Y for aromatic amino acids
  MISC_FEATURE (29)..(29): X is K, R or H for basic amino acids
  MISC_FEATURE (30)..(30): X is A and G
  MISC_FEATURE (31)..(31): X is D and E for acidic amino acids
  MISC_FEATURE (32)..(32): X is N or Q for amidated amino acids
  MISC_FEATURE (33)..(33): X is A and G
  MISC_FEATURE (34)..(34): X is F or P
  MISC_FEATURE (35)..(35): X is K, R or H for basic amino acids
  MISC_FEATURE (36)..(36): X is A and G
  MISC_FEATURE (37)..(37): X is D and E for acidic amino acids
  MISC_FEATURE (38)..(38): X is F or P

SEQ ID NO: 845 - protein, 39 aa, artificial; identical to SEQ ID NO: 184
  Completely synthesized peptide construct
  MISC_FEATURE (1)..(1): X is Acetyl or propionyl group, D glycine or D alanine, Cyclohexylalanine at amino terminus
  MISC_FEATURE (2)..(2): X is D and E for acidic amino acids
  MISC_FEATURE (3)..(3): X is A and G
  MISC_FEATURE (4)..(4): X is N or Q for amidated amino acids
  MISC_FEATURE (5)..(5): X is D and E for acidic amino acids
  MISC_FEATURE (6)..(6): X is D and E for acidic amino acids
  MISC_FEATURE (7)..(7): X is K, R or H for basic amino acids
  MISC_FEATURE (8)..(8): X is A and G
  MISC_FEATURE (9)..(9): X is A and G
  MISC_FEATURE (10)..(10): X is I, L or V
  MISC_FEATURE (11)..(11): X is I, L or V
  MISC_FEATURE (12)..(12): X is C or S
  MISC_FEATURE (13)..(13): X is T or S
  MISC_FEATURE (14)..(14): X is A and G
  MISC_FEATURE (15)..(15): X is I, L or V
  MISC_FEATURE (16)..(16): X is I, L or V
  MISC_FEATURE (17)..(17): X is A and G
  MISC_FEATURE (18)..(18): X is A and G
  MISC_FEATURE (19)..(19): X is A and G
  MISC_FEATURE (20)..(20): X is T or S
  MISC_FEATURE (21)..(21): X is A and G
  MISC_FEATURE (22)..(22): X is A and G
  MISC_FEATURE (23)..(23): X is K, R or H for basic amino acids
  MISC_FEATURE (24)..(24): X is F or P
  MISC_FEATURE (25)..(25): X is A and G
  MISC_FEATURE (26)..(26): X is I, L or V
  MISC_FEATURE (27)..(27): X is A and G
  MISC_FEATURE (28)..(28): X is A and G
  MISC_FEATURE (29)..(29): X is F, W or Y for aromatic amino acids
  MISC_FEATURE (30)..(30): X is K, R or H for basic amino acids
  MISC_FEATURE (31)..(31): X is A and G
  MISC_FEATURE (32)..(32): X is D and E for acidic amino acids
  MISC_FEATURE (33)..(33): X is N or Q for amidated amino acids
  MISC_FEATURE (34)..(34): X is A and G
  MISC_FEATURE (35)..(35): X is F or P
  MISC_FEATURE (36)..(36): X is K, R or H for basic amino acids
  MISC_FEATURE (37)..(37): X is A and G
  MISC_FEATURE (38)..(38): X is D and E for acidic amino acids
  MISC_FEATURE (39)..(39): X is F or P

SEQ ID NO: 846 - protein, 39 aa, artificial; identical to SEQ ID NO: 184
  Completely synthesized peptide construct
  MISC_FEATURE (1)..(1): X is 5-aminopentanoic acid for replacement of 3 or 4 amino acids of X2 and  X3
  MISC_FEATURE (2)..(2): X is D and E for acidic amino acids
  MISC_FEATURE (3)..(3): X is A and G
  MISC_FEATURE (4)..(4): X is N or Q for amidated amino acids
  MISC_FEATURE (5)..(5): X is D and E for acidic amino acids
  MISC_FEATURE (6)..(6): X is D and E for acidic amino acids
  MISC_FEATURE (7)..(7): X is K, R or H for basic amino acids
  MISC_FEATURE (8)..(8): X is A and G
  MISC_FEATURE (9)..(9): X is A and G
  MISC_FEATURE (10)..(10): X is I, L or V
  MISC_FEATURE (11)..(11): X is I, L or V
  MISC_FEATURE (12)..(12): X is C or S
  MISC_FEATURE (13)..(13): X is T or S
  MISC_FEATURE (14)..(14): X is A and G
  MISC_FEATURE (15)..(15): X is I, L or V
  MISC_FEATURE (16)..(16): X is I, L or V
  MISC_FEATURE (17)..(17): X is A and G
  MISC_FEATURE (18)..(18): X is A and G
  MISC_FEATURE (19)..(19): X is A and G
  MISC_FEATURE (20)..(20): X is T or S
  MISC_FEATURE (21)..(21): X is A and G
  MISC_FEATURE (22)..(22): X is A and G
  MISC_FEATURE (23)..(23): X is K, R or H for basic amino acids
  MISC_FEATURE (24)..(24): X is F or P
  MISC_FEATURE (25)..(25): X is A and G
  MISC_FEATURE (26)..(26): X is I, L or V
  MISC_FEATURE (27)..(27): X is A and G
  MISC_FEATURE (28)..(28): X is A and G
  MISC_FEATURE (29)..(29): X is F, W or Y for aromatic amino acids
  MISC_FEATURE (30)..(30): X is K, R or H for basic amino acids
  MISC_FEATURE (31)..(31): X is A and G
  MISC_FEATURE (32)..(32): X is D and E for acidic amino acids
  MISC_FEATURE (33)..(33): X is N or Q for amidated amino acids
  MISC_FEATURE (34)..(34): X is A and G
  MISC_FEATURE (35)..(35): X is F or P
  MISC_FEATURE (36)..(36): X is K, R or H for basic amino acids
  MISC_FEATURE (37)..(37): X is A and G
  MISC_FEATURE (38)..(38): X is D and E for acidic amino acids
  MISC_FEATURE (39)..(39): X is F or P

SEQ ID NO: 847 - protein, 36 aa, artificial; identical to SEQ ID NO: 172
  Completely synthesized peptide construct
  MISC_FEATURE (1)..(1): X is Acetyl or propionyl group, D glycine or D alanine, Cyclohexylalanine at amino terminus
  MISC_FEATURE (2)..(2): X is D and E for acidic amino acids
  MISC_FEATURE (3)..(3): X is A and G
  MISC_FEATURE (4)..(4): X is N or Q for amidated amino acids
  MISC_FEATURE (5)..(5): X is Gaba for X2X3 or X3X2 or X2X3 or X3X2 or X3X3 or X2X2
  MISC_FEATURE (6)..(6): X is K, R or H for basic amino acids
  MISC_FEATURE (7)..(7): X is A and G
  MISC_FEATURE (8)..(8): X is A and G
  MISC_FEATURE (9)..(9): X is Gaba for X2X3 or X3X2 or X2X3 or X3X2 or X3X3 or X2X2
  MISC_FEATURE (10)..(10): X is C or S
  MISC_FEATURE (11)..(11): X is T or S
  MISC_FEATURE (12)..(12): X is A and G
  MISC_FEATURE (13)..(13): X is Gaba for X2X3 or X3X2 or X2X3 or X3X2 or X3X3 or X2X2
  MISC_FEATURE (14)..(14): X is A and G
  MISC_FEATURE (15)..(15): X is A and G
  MISC_FEATURE (16)..(16): X is A and G
  MISC_FEATURE (17)..(17): X is T or S
  MISC_FEATURE (18)..(18): X is A and G
  MISC_FEATURE (19)..(19): X is A and G
  MISC_FEATURE (20)..(20): X is K, R or H for basic amino acids
  MISC_FEATURE (21)..(21): X is F or P
  MISC_FEATURE (22)..(22): X is A and G
  MISC_FEATURE (23)..(23): X is I, L or V
  MISC_FEATURE (24)..(24): X is A and G
  MISC_FEATURE (25)..(25): X is A and G
  MISC_FEATURE (26)..(26): X is F, W or Y for aromatic amino acids
  MISC_FEATURE (27)..(27): X is K, R or H for basic amino acids
  MISC_FEATURE (28)..(28): X is A and G
  MISC_FEATURE (29)..(29): X is D and E for acidic amino acids
  MISC_FEATURE (30)..(30): X is N or Q for amidated amino acids
  MISC_FEATURE (31)..(31): X is A and G
  MISC_FEATURE (32)..(32): X is F or P
  MISC_FEATURE (33)..(33): X is K, R or H for basic amino acids
  MISC_FEATURE (34)..(34): X is A and G
  MISC_FEATURE (35)..(35): X is D and E for acidic amino acids
  MISC_FEATURE (36)..(36): X is F or P

SEQ ID NO: 848 - protein, 33 aa, artificial; identical to SEQ ID NO: 99
  Completely synthesized peptide construct
  MISC_FEATURE (1)..(1): X is D and E for acidic amino acids
  MISC_FEATURE (2)..(2): X is A and G
  MISC_FEATURE (3)..(3): X is N or Q for amidated amino acids
  MISC_FEATURE (4)..(4): X is D and E for acidic amino acids
  MISC_FEATURE (5)..(5): X is D and E for acidic amino acids
  MISC_FEATURE (6)..(6): X is K, R or H for basic amino acids
  MISC_FEATURE (7)..(7): X is A and G
  MISC_FEATURE (8)..(8): X is A and G
  MISC_FEATURE (9)..(9): X is I, L or V
  MISC_FEATURE (10)..(10): X is I, L or V
  MISC_FEATURE (11)..(11): X is C or S
  MISC_FEATURE (12)..(12): X is T or S
  MISC_FEATURE (13)..(13): X is A and G
  MISC_FEATURE (14)..(14): X is I, L or V
  MISC_FEATURE (15)..(15): X is I, L or V
  MISC_FEATURE (16)..(16): X is A and G
  MISC_FEATURE (17)..(17): X is A and G
  MISC_FEATURE (18)..(18): X is A and G
  MISC_FEATURE (19)..(19): X is T or S
  MISC_FEATURE (20)..(20): X is X1X1 or X1X3 or X3X1 or X1X2 or X2X1
  MISC_FEATURE (21)..(21): X is K, R or H for basic amino acids
  MISC_FEATURE (22)..(22): X is F or P
  MISC_FEATURE (23)..(23): X is Gaba for X2 X3 or X3 X2 or X2X3 or X3X2 or X3X3 or X2X2
  MISC_FEATURE (24)..(24): X is X1X1 or X1X3 or X3X1 or X1X2 or X2X1
  MISC_FEATURE (25)..(25): X is F, W or Y for aromatic amino acids
  MISC_FEATURE (26)..(26): X is K, R or H for basic amino acids
  MISC_FEATURE (27)..(27): X is X1X1 or X1X3 or X3X1 or X1X2 or X2X1
  MISC_FEATURE (28)..(28): X is N or Q for amidated amino acids
  MISC_FEATURE (29)..(29): X is A and G
  MISC_FEATURE (30)..(30): X is F or P
  MISC_FEATURE (31)..(31): X is K, R or H for basic amino acids
  MISC_FEATURE (32)..(32): X is X1X1 or X1X3 or X3X1 or X1X2 or X2X1
  MISC_FEATURE (33)..(33): X is F or P

SEQ ID NO: 849 - protein, 34 aa, artificial; identical to SEQ ID NO: 79
  Completely synthesized peptide construct
  MISC_FEATURE (1)..(1): X is Acetyl or propionyl group, D glycine or D alanine, Cyclohexylalanine at amino terminus
  MISC_FEATURE (2)..(2): X is D and E for acidic amino acids
  MISC_FEATURE (3)..(3): X is A and G
  MISC_FEATURE (4)..(4): X is N or Q for amidated amino acids
  MISC_FEATURE (5)..(5): X is D and E for acidic amino acids
  MISC_FEATURE (6)..(6): X is D and E for acidic amino acids
  MISC_FEATURE (7)..(7): X is K, R or H for basic amino acids
  MISC_FEATURE (8)..(8): X is A and G
  MISC_FEATURE (9)..(9): X is A and G
  MISC_FEATURE (10)..(10): X is I, L or V
  MISC_FEATURE (11)..(11): X is I, L or V
  MISC_FEATURE (12)..(12): X is C or S
  MISC_FEATURE (13)..(13): X is T or S
  MISC_FEATURE (14)..(14): X is A and G
  MISC_FEATURE (15)..(15): X is I, L or V
  MISC_FEATURE (16)..(16): X is I, L or V
  MISC_FEATURE (17)..(17): X is A and G
  MISC_FEATURE (18)..(18): X is A and G
  MISC_FEATURE (19)..(19): X is A and G
  MISC_FEATURE (20)..(20): X is T or S
  MISC_FEATURE (21)..(21): X is X1X1 or X1X3 or X3X1 or X1X2 or X2X1
  MISC_FEATURE (22)..(22): X is K, R or H for basic amino acids
  MISC_FEATURE (23)..(23): X is F or P
  MISC_FEATURE (24)..(24): X is Gaba for X2X3 or X3X2 or X2X3 or X3X2 or X3X3 or X2X2
  MISC_FEATURE (25)..(25): X is X1X1 or X1X3 or X3X1 or X1X2 or X2X1
  MISC_FEATURE (26)..(26): X is F, W or Y for aromatic amino acids
  MISC_FEATURE (27)..(27): X is K, R or H for basic amino acids
  MISC_FEATURE (28)..(28): X is X1X1 or X1X3 or X3X1 or X1X2 or X2X1
  MISC_FEATURE (29)..(29): X is N or Q for amidated amino acids
  MISC_FEATURE (30)..(30): X is A and G
  MISC_FEATURE (31)..(31): X is F or P
  MISC_FEATURE (32)..(32): X is K, R or H for basic amino acids
  MISC_FEATURE (33)..(33): X is X1X1 or X1X3 or X3X1 or X1X2 or X2X1
  MISC_FEATURE (34)..(34): X is F or P

SEQ ID NO: 850 - protein, 34 aa, artificial; identical to SEQ ID NO: 79
  Completely synthesized peptide construct
  MISC_FEATURE (1)..(1): X is 5-aminopentanoic acid for replacement of 3 or 4 amino acids of X2 and  X3
  MISC_FEATURE (2)..(2): X is D and E for acidic amino acids
  MISC_FEATURE (3)..(3): X is A and G
  MISC_FEATURE (4)..(4): X is N or Q for amidated amino acids
  misc_feature (5)..(5): Xaa can be any naturally occurring amino acid
  MISC_FEATURE (6)..(6): X is D and E for acidic amino acids
  MISC_FEATURE (7)..(7): X is K, R or H for basic amino acids
  MISC_FEATURE (8)..(8): X is A and G
  MISC_FEATURE (9)..(9): X is A and G
  MISC_FEATURE (10)..(10): X is A and G
  MISC_FEATURE (11)..(11): X is I, L or V
  MISC_FEATURE (12)..(12): X is C or S
  MISC_FEATURE (13)..(13): X is T or S
  MISC_FEATURE (14)..(14): X is A and G
  MISC_FEATURE (15)..(15): X is I, L or V
  MISC_FEATURE (16)..(16): X is I, L or V
  misc_feature (17)..(17): Xaa can be any naturally occurring amino acid
  MISC_FEATURE (18)..(18): X is A and G
  MISC_FEATURE (19)..(19): X is A and G
  MISC_FEATURE (20)..(20): X is T or S
  MISC_FEATURE (21)..(21): X is X1X1 or X1X3 or X3X1 or X1X2 or X2X1
  MISC_FEATURE (22)..(22): X is K, R or H for basic amino acids
  MISC_FEATURE (23)..(23): X is F or P
  MISC_FEATURE (24)..(24): X is Gaba for X2X3 or X3X2 or X2X3 pr X3X2 or X3X3 or X2X2
  MISC_FEATURE (25)..(25): X is X1X1 or X1X3 or X3X1 or X1X2 or X2X1
  MISC_FEATURE (26)..(26): X is F, W or Y for aromatic amino acids
  MISC_FEATURE (27)..(27): X is K, R or H for basic amino acids
  MISC_FEATURE (28)..(28): X is X1X1 or X1X3 or X3X1 or X1X2 or X2X1
  MISC_FEATURE (29)..(29): X is N or Q for amidated amino acids
  MISC_FEATURE (30)..(30): X is A and G
  MISC_FEATURE (31)..(31): X is F or P
  MISC_FEATURE (32)..(32): X is K, R or H for basic amino acids
  MISC_FEATURE (33)..(33): X is X1X1 or X1X3 or X3X1 or X1X2 or X2X1
  MISC_FEATURE (34)..(34): X is F or P

SEQ ID NO: 851 - protein, 31 aa, artificial; identical to SEQ ID NO: 130
  Completely synthesized peptide construct
  MISC_FEATURE (1)..(1): X is Acetyl or propionyl group, D glycine or D alanine, Cyclohexylalanine at amino terminus
  MISC_FEATURE (2)..(2): X is D and E for acidic amino acids
  MISC_FEATURE (3)..(3): X is A and G
  MISC_FEATURE (4)..(4): X is N or Q for amidated amino acids
  MISC_FEATURE (5)..(5): X is Gaba for X2X3 or X3X3 or X2X3 or X3X2 or X3X3 or X2X2
  MISC_FEATURE (6)..(6): X is K, R or H for basic amino acids
  MISC_FEATURE (7)..(7): X is A and G
  MISC_FEATURE (8)..(8): X is A and G
  MISC_FEATURE (9)..(9): X is Gaba for X2X3 or X3X3 or X2X3 or X3X2 or X3X3 or X2X2
  MISC_FEATURE (10)..(10): X is C or S
  MISC_FEATURE (11)..(11): X is T or S
  MISC_FEATURE (12)..(12): X is A and G
  MISC_FEATURE (13)..(13): X is Gaba for X2X3 or X3X3 or X2X3 or X3X2 or X3X3 or X2X2
  MISC_FEATURE (14)..(14): X is A and G
  MISC_FEATURE (15)..(15): X is A and G
  MISC_FEATURE (16)..(16): X is A and G
  MISC_FEATURE (17)..(17): X is T or S
  MISC_FEATURE (18)..(18): X is X1X1 or X1X3 or X3X1 or X1X2 or X2X1
  MISC_FEATURE (19)..(19): X is K, R or H for basic amino acids
  MISC_FEATURE (20)..(20): X is F or P
  MISC_FEATURE (21)..(21): X is Gaba for X2X3 or X3X3 or X2X3 or X3X2 or X3X3 or X2X2
  MISC_FEATURE (22)..(22): X is X is X1X1 or X1X3 or X3X1 or X1X2 or X2X1
  MISC_FEATURE (23)..(23): X is F, W or Y for aromatic amino acids
  MISC_FEATURE (24)..(24): X is K, R or H for basic amino acids
  MISC_FEATURE (25)..(25): X is X is X1X1 or X1X3 or X3X1 or X1X2 or X2X1
  MISC_FEATURE (26)..(26): X is N or Q for amidated amino acids
  MISC_FEATURE (27)..(27): X is A and G
  MISC_FEATURE (28)..(28): X is F or P
  MISC_FEATURE (29)..(29): X is K, R or H for basic amino acids
  MISC_FEATURE (30)..(30): X is X is X1X1 or X1X3 or X3X1 or X1X2 or X2X1
  MISC_FEATURE (31)..(31): X is F or P

SEQ ID NO: 852 - protein, 36 aa, artificial
  Completely synthesized peptide construct
DLLKNGERIEKVEGGGTGGKPGIAGFKGEQGPKGEP

SEQ ID NO: 853 - protein, 36 aa, artificial; identical to SEQ ID NO: 172
  Completely synthesized peptide construct
  MISC_FEATURE (1)..(1): X is D and E for acidic amino acids
  MISC_FEATURE (2)..(2): X is I, L or V
  MISC_FEATURE (3)..(3): X is I, L or V
  MISC_FEATURE (4)..(4): X is K, R or H for basic amino acids
  MISC_FEATURE (5)..(5): X is N or Q for amidated amino acids
  MISC_FEATURE (6)..(6): X is A and G
  MISC_FEATURE (7)..(7): X is D and E for acidic amino acids
  MISC_FEATURE (8)..(8): X is K, R or H for basic amino acids
  MISC_FEATURE (9)..(9): X is I, L or V
  MISC_FEATURE (10)..(10): X is D and E for acidic amino acids
  MISC_FEATURE (11)..(11): X is K, R or H for basic amino acids
  MISC_FEATURE (12)..(12): X is I, L or V
  MISC_FEATURE (13)..(13): X is D and E for acidic amino acids
  MISC_FEATURE (14)..(14): X is A and G
  MISC_FEATURE (15)..(15): X is A and G
  MISC_FEATURE (16)..(16): X is A and G
  MISC_FEATURE (17)..(17): X is T or S
  MISC_FEATURE (18)..(18): X is A and G
  MISC_FEATURE (19)..(19): X is A and G
  MISC_FEATURE (20)..(20): X is K, R or H for basic amino acids
  MISC_FEATURE (21)..(21): X is F or P
  MISC_FEATURE (22)..(22): X is A and G
  MISC_FEATURE (23)..(23): X is I, L or V
  MISC_FEATURE (24)..(24): X is A and G
  MISC_FEATURE (25)..(25): X is A and G
  MISC_FEATURE (26)..(26): X is F, W or Y for aromatic amino acids
  MISC_FEATURE (27)..(27): X is K, R or H for basic amino acids
  MISC_FEATURE (28)..(28): X is A and G
  MISC_FEATURE (29)..(29): X is D and E for acidic amino acids
  MISC_FEATURE (30)..(30): X is N or Q for amidated amino acids
  MISC_FEATURE (31)..(31): X is A and G
  MISC_FEATURE (32)..(32): X is F or P
  MISC_FEATURE (33)..(33): X is K, R or H for basic amino acids
  MISC_FEATURE (34)..(34): X is A and G
  MISC_FEATURE (35)..(35): X is D and E for acidic amino acids
  MISC_FEATURE (36)..(36): X is F or P

SEQ ID NO: 854 - protein, 37 aa, artificial; identical to SEQ ID NO: 158
  Completely synthesized peptide construct
  MISC_FEATURE (1)..(1): X is Acetyl or propionyl group, D glycine or D alanine, Cyclohexylalanine at amino terminus
  MISC_FEATURE (2)..(2): X is D and E for acidic amino acids
  MISC_FEATURE (3)..(3): X is I, L or V
  MISC_FEATURE (4)..(4): X is I, L or V
  MISC_FEATURE (5)..(5): X is K, R or H for basic amino acids
  MISC_FEATURE (6)..(6): X is N or Q for amidated amino acids
  MISC_FEATURE (7)..(7): X is A and G
  MISC_FEATURE (8)..(8): X is D and E for acidic amino acids
  MISC_FEATURE (9)..(9): X is K, R or H for basic amino acids
  MISC_FEATURE (10)..(10): X is I, L or V
  MISC_FEATURE (11)..(11): X is D and E for acidic amino acids
  MISC_FEATURE (12)..(12): X is K, R or H for basic amino acids
  MISC_FEATURE (13)..(13): X is I, L or V
  MISC_FEATURE (14)..(14): X is D and E for acidic amino acids
  MISC_FEATURE (15)..(15): X is A and G
  MISC_FEATURE (16)..(16): X is A and G
  MISC_FEATURE (17)..(17): X is A and G
  MISC_FEATURE (18)..(18): X is T or S
  MISC_FEATURE (19)..(19): X is A and G
  MISC_FEATURE (20)..(20): X is A and G
  MISC_FEATURE (21)..(21): X is K, R or H for basic amino acids
  MISC_FEATURE (22)..(22): X is F or P
  MISC_FEATURE (23)..(23): X is A and G
  MISC_FEATURE (24)..(24): X is I, L or V
  MISC_FEATURE (25)..(25): X is A and G
  MISC_FEATURE (26)..(26): X is A and G
  MISC_FEATURE (27)..(27): X is F, W or Y for aromatic amino acids
  MISC_FEATURE (28)..(28): X is K, R or H for basic amino acids
  MISC_FEATURE (29)..(29): X is A and G
  MISC_FEATURE (30)..(30): X is D and E for acidic amino acids
  MISC_FEATURE (31)..(31): X is N or Q for amidated amino acids
  MISC_FEATURE (32)..(32): X is A and G
  MISC_FEATURE (33)..(33): X is F or P
  MISC_FEATURE (34)..(34): X is K, R or H for basic amino acids
  MISC_FEATURE (35)..(35): X is A and G
  MISC_FEATURE (36)..(36): X is D and E for acidic amino acids
  MISC_FEATURE (37)..(37): X is F or P

SEQ ID NO: 855 - protein, 33 aa, artificial; identical to SEQ ID NO: 99
  Completely synthesized peptide construct
  MISC_FEATURE (1)..(1): X is Acetyl or propionyl group, D glycine or D alanine, Cyclohexylalanine at amino terminus
  MISC_FEATURE (2)..(2): X is Gaba for X2X3 or X3X2 or X2X3 or X3X2 or X3X3 or X2X2
  MISC_FEATURE (3)..(3): X is K, R or H for basic amino acids
  MISC_FEATURE (4)..(4): X is N or Q for amidated amino acids
  MISC_FEATURE (5)..(5): X is A and G
  MISC_FEATURE (6)..(6): X is D and E for acidic amino acids
  MISC_FEATURE (7)..(7): X is K, R or H for basic amino acids
  MISC_FEATURE (8)..(8): X is Gaba for X2X3 or X3X2 or X2X3 or X3X2 or X3X3 or X2X2
  MISC_FEATURE (9)..(9): X is K, R or H for basic amino acids
  MISC_FEATURE (10)..(10): X is Gaba for X2X3 or X3X2 or X2X3 or X3X2 or X3X3 or X2X2
  MISC_FEATURE (11)..(11): X is A and G
  MISC_FEATURE (12)..(12): X is A and G
  MISC_FEATURE (13)..(13): X is A and G
  MISC_FEATURE (14)..(14): X is T or S
  MISC_FEATURE (15)..(15): X is A and G
  MISC_FEATURE (16)..(16): X is A and G
  MISC_FEATURE (17)..(17): X is K, R or H for basic amino acids
  MISC_FEATURE (18)..(18): X is F or P
  MISC_FEATURE (19)..(19): X is A and G
  MISC_FEATURE (20)..(20): X is I, L or V
  MISC_FEATURE (21)..(21): X is A and G
  MISC_FEATURE (22)..(22): X is A and G
  MISC_FEATURE (23)..(23): X is F, W or Y for aromatic amino acids
  MISC_FEATURE (24)..(24): X is K, R or H for basic amino acids
  MISC_FEATURE (25)..(25): X is A and G
  MISC_FEATURE (26)..(26): X is D and E for acidic amino acids
  MISC_FEATURE (27)..(27): X is N or Q for amidated amino acids
  MISC_FEATURE (28)..(28): X is A and G
  MISC_FEATURE (29)..(29): X is F or P
  MISC_FEATURE (30)..(30): X is K, R or H for basic amino acids
  MISC_FEATURE (31)..(31): X is A and G
  MISC_FEATURE (32)..(32): X is D and E for acidic amino acids
  MISC_FEATURE (33)..(33): X is F or P

SEQ ID NO: 856 - protein, 33 aa, artificial; identical to SEQ ID NO: 99
  Completely synthesized peptide construct
  MISC_FEATURE (1)..(1): X is Acetyl or propionyl group, D glycine or D alanine, Cyclohexylalanine at amino terminus
  MISC_FEATURE (2)..(2): X is 5-aminopentanoic acid for replacement of 3 or 4 amino acids of X2 and  X3
  MISC_FEATURE (3)..(3): X is K, R or H for basic amino acids
  MISC_FEATURE (4)..(4): X is N or Q for amidated amino acids
  MISC_FEATURE (5)..(5): X is A and G
  MISC_FEATURE (6)..(6): X is D and E for acidic amino acids
  MISC_FEATURE (7)..(7): X is K, R or H for basic amino acids
  MISC_FEATURE (8)..(8): X is Gaba for X2X3 or X3X2 or X2X3 or X3X2 or X3X3 or X2X2
  MISC_FEATURE (9)..(9): X is K, R or H for basic amino acids
  MISC_FEATURE (10)..(10): X is Gaba for X2X3 or X3X2 or X2X3 or X3X2 or X3X3 or X2X2
  MISC_FEATURE (11)..(11): X is A and G
  MISC_FEATURE (12)..(12): X is A and G
  MISC_FEATURE (13)..(13): X is A and G
  MISC_FEATURE (14)..(14): X is T or S
  MISC_FEATURE (15)..(15): X is A and G
  MISC_FEATURE (16)..(16): X is A and G
  MISC_FEATURE (17)..(17): X is K, R or H for basic amino acids
  MISC_FEATURE (18)..(18): X is F or P
  MISC_FEATURE (19)..(19): X is A and G
  MISC_FEATURE (20)..(20): X is I, L or V
  MISC_FEATURE (21)..(21): X is A and G
  MISC_FEATURE (22)..(22): X is A and G
  MISC_FEATURE (23)..(23): X is F, W or Y for aromatic amino acids
  MISC_FEATURE (24)..(24): X is K, R or H for basic amino acids
  MISC_FEATURE (25)..(25): X is A and G
  MISC_FEATURE (26)..(26): X is D and E for acidic amino acids
  MISC_FEATURE (27)..(27): X is N or Q for amidated amino acids
  MISC_FEATURE (28)..(28): X is A and G
  MISC_FEATURE (29)..(29): X is F or P
  MISC_FEATURE (30)..(30): X is K, R or H for basic amino acids
  MISC_FEATURE (31)..(31): X is A and G
  MISC_FEATURE (32)..(32): X is D and E for acidic amino acids
  MISC_FEATURE (33)..(33): X is F or P

SEQ ID NO: 857 - protein, 31 aa, artificial; identical to SEQ ID NO: 130
  Completely synthesized peptide construct
  MISC_FEATURE (1)..(1): X is D and E for acidic amino acids
  MISC_FEATURE (2)..(2): X is I, L or V
  MISC_FEATURE (3)..(3): X is I, L or V
  MISC_FEATURE (4)..(4): X is K, R or H for basic amino acids
  MISC_FEATURE (5)..(5): X is N or Q for amidated amino acids
  MISC_FEATURE (6)..(6): X is A and G
  MISC_FEATURE (7)..(7): X is D and E for acidic amino acids
  MISC_FEATURE (8)..(8): X is K, R or H for basic amino acids
  MISC_FEATURE (9)..(9): X is I, L or V
  MISC_FEATURE (10)..(10): X is D and E for acidic amino acids
  MISC_FEATURE (11)..(11): X is K, R or H for basic amino acids
  MISC_FEATURE (12)..(12): X is I, L or V
  MISC_FEATURE (13)..(13): X is D and E for acidic amino acids
  MISC_FEATURE (14)..(14): X is A and G
  MISC_FEATURE (15)..(15): X is A and G
  MISC_FEATURE (16)..(16): X is A and G
  MISC_FEATURE (17)..(17): X is T or S
  MISC_FEATURE (18)..(18): X is X1X1 or X1X3 or X3X1 or X1X2 or X2X1
  MISC_FEATURE (19)..(19): X is K, R or H for basic amino acids
  MISC_FEATURE (20)..(20): X is F or P
  MISC_FEATURE (21)..(21): X is Gaba for X2X3 or X3X2 or X2X3 or X3X2 or X3X3 or X2X2
  MISC_FEATURE (22)..(22): X is X1X1 or X1X3 or X3X1 or X1X2 or X2X1
  MISC_FEATURE (23)..(23): X is F, W or Y for aromatic amino acids
  MISC_FEATURE (24)..(24): X is K, R or H for basic amino acids
  MISC_FEATURE (25)..(25): X is X1X1 or X1X3 or X3X1 or X1X2 or X2X1
  MISC_FEATURE (26)..(26): X is N or Q for amidated amino acids
  MISC_FEATURE (27)..(27): X is A and G
  MISC_FEATURE (28)..(28): X is F or P
  MISC_FEATURE (29)..(29): X is K, R or H for basic amino acids
  MISC_FEATURE (30)..(30): X is X1X1 or X1X3 or X3X1 or X1X2 or X2X1
  MISC_FEATURE (31)..(31): X is F or P

SEQ ID NO: 858 - protein, 32 aa, artificial; identical to SEQ ID NO: 160
  Completely synthesized peptide construct
  MISC_FEATURE (1)..(1): X is Acetyl or propionyl group, D glycine or D alanine, Cyclohexylalanine at amino terminus
  MISC_FEATURE (2)..(2): X is D and E for acidic amino acids
  MISC_FEATURE (3)..(3): X is I, L or V
  MISC_FEATURE (4)..(4): X is I, L or V
  MISC_FEATURE (5)..(5): X is K, R or H for basic amino acids
  MISC_FEATURE (6)..(6): X is N or Q for amidated amino acids
  MISC_FEATURE (7)..(7): X is A and G
  MISC_FEATURE (8)..(8): X is D and E for acidic amino acids
  MISC_FEATURE (9)..(9): X is K, R or H for basic amino acids
  MISC_FEATURE (10)..(10): X is I, L or V
  MISC_FEATURE (11)..(11): X is D and E for acidic amino acids
  MISC_FEATURE (12)..(12): X is K, R or H for basic amino acids
  MISC_FEATURE (13)..(13): X is I, L or V
  MISC_FEATURE (14)..(14): X is D and E for acidic amino acids
  MISC_FEATURE (15)..(15): X is A and G
  MISC_FEATURE (16)..(16): X is A and G
  MISC_FEATURE (17)..(17): X is A and G
  MISC_FEATURE (18)..(18): X is T or S
  MISC_FEATURE (19)..(19): X is X1X1 or X1X3 or X3X1 or X1X2 or X2X1
  MISC_FEATURE (20)..(20): X is K, R or H for basic amino acids
  MISC_FEATURE (21)..(21): X is F or P
  MISC_FEATURE (22)..(22): X is Gaba for X2X3 or X3X2 or X2X3 or X3X2 or X3X3 or X2X2
  MISC_FEATURE (23)..(23): X is X1X1 or X1X3 or X3X1 or X1X2 or X2X1
  MISC_FEATURE (24)..(24): X is F, W or Y for aromatic amino acids
  MISC_FEATURE (25)..(25): X is K, R or H for basic amino acids
  MISC_FEATURE (26)..(26): X is X1X1 or X1X3 or X3X1 or X1X2 or X2X1
  MISC_FEATURE (27)..(27): X is N or Q for amidated amino acids
  MISC_FEATURE (28)..(28): X is A and G
  MISC_FEATURE (29)..(29): X is F or P
  MISC_FEATURE (30)..(30): X is K, R or H for basic amino acids
  MISC_FEATURE (31)..(31): X is X1X1 or X1X3 or X3X1 or X1X2 or X2X1
  MISC_FEATURE (32)..(32): X is F or P

SEQ ID NO: 859 - protein, 27 aa, artificial
  Completely synthesized peptide construct
  MISC_FEATURE (1)..(1): X is Acetyl or propionyl group, D glycine or D alanine, Cyclohexylalanine at amino terminus
  MISC_FEATURE (2)..(2): X is Gaba for X2X3 or X3X2 or X2X3 or X3X2 or X3X3 or X2X2
  MISC_FEATURE (3)..(3): X is K, R or H for basic amino acids
  MISC_FEATURE (4)..(4): X is N or Q for amidated amino acids
  MISC_FEATURE (5)..(5): X is A and G
  MISC_FEATURE (6)..(6): X is D and E for acidic amino acids
  MISC_FEATURE (7)..(7): X is K, R or H for basic amino acids
  MISC_FEATURE (8)..(8): X is Gaba for X2X3 or X3X2 or X2X3 or X3X2 or X3X3 or X2X2
  MISC_FEATURE (9)..(9): X is K, R or H for basic amino acids
  MISC_FEATURE (10)..(10): X is Gaba for X2X3 or X3X2 or X2X3 or X3X2 or X3X3 or X2X2
  MISC_FEATURE (11)..(11): X is A and G
  MISC_FEATURE (12)..(12): X is A and G
  MISC_FEATURE (13)..(13): X is A and G
  MISC_FEATURE (14)..(14): X is T or S
  MISC_FEATURE (15)..(15): X is X1X1 or X1X3 or X3X1 or X1X2 or X2X1
  MISC_FEATURE (16)..(16): X is K, R or H for basic amino acids
  MISC_FEATURE (17)..(17): X is F or P
  MISC_FEATURE (18)..(18): X is Gaba for X2X3 or X3X2 or X2X3 or X3X2 or X3X3 or X2X2
  MISC_FEATURE (19)..(19): X is X1X1 or X1X3 or X3X1 or X1X2 or X2X1
  MISC_FEATURE (20)..(20): X is F, W or Y for aromatic amino acids
  MISC_FEATURE (21)..(21): X is K, R or H for basic amino acids
  MISC_FEATURE (22)..(22): X is X1X1 or X1X3 or X3X1 or X1X2 or X2X1
  MISC_FEATURE (23)..(23): X is N or Q for amidated amino acids
  MISC_FEATURE (24)..(24): X is A and G
  MISC_FEATURE (25)..(25): X is F or P
  MISC_FEATURE (26)..(26): X is K, R or H for basic amino acids
  MISC_FEATURE (27)..(27): X is X1X1 or X1X3 or X3X1 or X1X2 or X2X1
  MISC_FEATURE (28)..(28): X is F or P
XXXXXXXXXXXXXXXXXXXXXXXXXXX

SEQ ID NO: 860 - protein, 28 aa, artificial
  Completely synthesized peptide construct
  MISC_FEATURE (1)..(1): X is Acetyl or propionyl group, D glycine or D alanine, Cyclohexylalanine at amino terminus
  MISC_FEATURE (2)..(2): X is 5-aminopentanoic acid for replacement of 3 or 4 amino acids of X2 and  X3
  MISC_FEATURE (3)..(3): X is K, R or H for basic amino acids
  MISC_FEATURE (4)..(4): X is N or Q for amidated amino acids
  MISC_FEATURE (5)..(5): X is A and G
  MISC_FEATURE (6)..(6): X is D and E for acidic amino acids
  MISC_FEATURE (7)..(7): X is K, R or H for basic amino acids
  MISC_FEATURE (8)..(8): X is Gaba for X2X3 or X3X2 or X2X3 or X3X2 or X3X3 or X2X2
  MISC_FEATURE (9)..(9): X is K, R or H for basic amino acids
  MISC_FEATURE (10)..(10): X is Gaba for X2X3 or X3X2 or X2X3 or X3X2 or X3X3 or X2X2
  MISC_FEATURE (11)..(11): X is A and G
  MISC_FEATURE (12)..(12): X is A and G
  MISC_FEATURE (13)..(13): X is A and G
  MISC_FEATURE (14)..(14): X is T or S
  MISC_FEATURE (15)..(15): X is X1X1 or X1X3 or X3X1 or X1X2 or X2X1
  MISC_FEATURE (16)..(16): X is K, R or H for basic amino acids
  MISC_FEATURE (17)..(17): X is F or P
  MISC_FEATURE (18)..(18): X is Gaba for X2X3 or X3X2 or X2X3 or X3X2 or X3X3 or X2X2
  MISC_FEATURE (19)..(19): X is X1X1 or X1X3 or X3X1 or X1X2 or X2X1
  MISC_FEATURE (20)..(20): X is F, W or Y for aromatic amino acids
  MISC_FEATURE (21)..(21): X is K, R or H for basic amino acids
  MISC_FEATURE (22)..(22): X is X1X1 or X1X3 or X3X1 or X1X2 or X2X1
  MISC_FEATURE (23)..(23): X is N or Q for amidated amino acids
  MISC_FEATURE (24)..(24): X is A and G
  MISC_FEATURE (25)..(25): X is F or P
  MISC_FEATURE (26)..(26): X is K, R or H for basic amino acids
  MISC_FEATURE (27)..(27): X is X1X1 or X1X3 or X3X1 or X1X2 or X2X1
  MISC_FEATURE (28)..(28): X is F or P
XXXXXXXXXXXXXXXXXXXXXXXXXXXX

SEQ ID NO: 861 - protein, 38 aa, artificial
  Completely synthesized peptide construct
TGGKPGIAGFKGEQGPKGEPGGGDGQEEKAGVVSTGLI

SEQ ID NO: 862 - protein, 38 aa, artificial; identical to SEQ ID NO: 170
  Completely synthesized peptide construct
  MISC_FEATURE (1)..(1): X is T or S
  MISC_FEATURE (2)..(2): X is A and G
  MISC_FEATURE (3)..(3): X is A and G
  MISC_FEATURE (4)..(4): X is K, R or H for basic amino acids
  MISC_FEATURE (5)..(5): X is F or P
  MISC_FEATURE (6)..(6): X is A and G
  MISC_FEATURE (7)..(7): X is I, L or V
  MISC_FEATURE (8)..(8): X is A and G
  MISC_FEATURE (9)..(9): X is A and G
  MISC_FEATURE (10)..(10): X is F, W or Y for aromatic amino acids
  MISC_FEATURE (11)..(11): X is K, R or H for basic amino acids
  MISC_FEATURE (12)..(12): X is A and G
  MISC_FEATURE (13)..(13): X is D and E for acidic amino acids
  MISC_FEATURE (14)..(14): X is N or Q for amidated amino acids
  MISC_FEATURE (15)..(15): X is A and G
  MISC_FEATURE (16)..(16): X is F or P
  MISC_FEATURE (17)..(17): X is K, R or H for basic amino acids
  MISC_FEATURE (18)..(18): X is A and G
  MISC_FEATURE (19)..(19): X is D and E for acidic amino acids
  MISC_FEATURE (20)..(20): X is F or P
  MISC_FEATURE (21)..(21): X is A and G
  MISC_FEATURE (22)..(22): X is A and G
  MISC_FEATURE (23)..(23): X is A and G
  MISC_FEATURE (24)..(24): X is D and E for acidic amino acids
  MISC_FEATURE (25)..(25): X is A and G
  MISC_FEATURE (26)..(26): X is N or Q for amidated amino acids
  MISC_FEATURE (27)..(27): X is D and E for acidic amino acids
  MISC_FEATURE (28)..(28): X is D and E for acidic amino acids
  MISC_FEATURE (29)..(29): X is K, R or H for basic amino acids
  MISC_FEATURE (30)..(30): X is A and G
  MISC_FEATURE (31)..(31): X is A and G
  MISC_FEATURE (32)..(32): X is I, L or V
  MISC_FEATURE (33)..(33): X is I, L or V
  MISC_FEATURE (34)..(34): X is C or S
  MISC_FEATURE (35)..(35): X is T or S
  MISC_FEATURE (36)..(36): X is A and G
  MISC_FEATURE (37)..(37): X is I, L or V
  MISC_FEATURE (38)..(38): X is I, L or V

SEQ ID NO: 863 - protein, 39 aa, artificial; identical to SEQ ID NO: 184
  Completely synthesized peptide construct
  MISC_FEATURE (1)..(1): X is T or S
  MISC_FEATURE (2)..(2): X is A and G
  MISC_FEATURE (3)..(3): X is A and G
  MISC_FEATURE (4)..(4): X is K, R or H for basic amino acids
  MISC_FEATURE (5)..(5): X is F or P
  MISC_FEATURE (6)..(6): X is A and G
  MISC_FEATURE (7)..(7): X is I, L or V
  MISC_FEATURE (8)..(8): X is A and G
  MISC_FEATURE (9)..(9): X is A and G
  MISC_FEATURE (10)..(10): X is F, W or Y for aromatic amino acids
  MISC_FEATURE (11)..(11): X is K, R or H for basic amino acids
  MISC_FEATURE (12)..(12): X is A and G
  MISC_FEATURE (13)..(13): X is D and E for acidic amino acids
  MISC_FEATURE (14)..(14): X is N or Q for amidated amino acids
  MISC_FEATURE (15)..(15): X is A and G
  MISC_FEATURE (16)..(16): X is F or P
  MISC_FEATURE (17)..(17): X is K, R or H for basic amino acids
  MISC_FEATURE (18)..(18): X is A and G
  MISC_FEATURE (19)..(19): X is D and E for acidic amino acids
  MISC_FEATURE (20)..(20): X is F or P
  misc_feature (21)..(21): Xaa can be any naturally occurring amino acid
  MISC_FEATURE (22)..(22): X is A and G
  MISC_FEATURE (23)..(23): X is A and G
  MISC_FEATURE (24)..(24): X is Acetyl or propionyl group, D glycine or D alanine, Cyclohexylalanine at amino terminus
  MISC_FEATURE (25)..(25): X is D and E for acidic amino acids
  MISC_FEATURE (26)..(26): X is A and G
  MISC_FEATURE (27)..(27): X is N or Q for amidated amino acids
  MISC_FEATURE (28)..(28): X is D and E for acidic amino acids
  MISC_FEATURE (29)..(29): X is D and E for acidic amino acids
  MISC_FEATURE (30)..(30): X is K, R or H for basic amino acids
  MISC_FEATURE (31)..(31): X is A and G
  MISC_FEATURE (32)..(32): X is A and G
  MISC_FEATURE (33)..(33): X is I, L or V
  MISC_FEATURE (34)..(34): X is I, L or V
  MISC_FEATURE (35)..(35): X is C or S
  MISC_FEATURE (36)..(36): X is T or S
  MISC_FEATURE (37)..(37): X is A and G
  MISC_FEATURE (38)..(38): X is I, L or V
  MISC_FEATURE (39)..(39): X is I, L or V

SEQ ID NO: 864 - protein, 39 aa, artificial; identical to SEQ ID NO: 184
  Completely synthesized peptide construct
  MISC_FEATURE (1)..(1): X is T or S
  MISC_FEATURE (2)..(2): X is A and G
  MISC_FEATURE (3)..(3): X is A and G
  MISC_FEATURE (4)..(4): X is K, R or H for basic amino acids
  MISC_FEATURE (5)..(5): X is F or P
  MISC_FEATURE (6)..(6): X is A and G
  MISC_FEATURE (7)..(7): X is I, L or V
  MISC_FEATURE (8)..(8): X is A and G
  MISC_FEATURE (9)..(9): X is A and G
  MISC_FEATURE (10)..(10): X is F, W or Y for aromatic amino acids
  MISC_FEATURE (11)..(11): X is K, R or H for basic amino acids
  MISC_FEATURE (12)..(12): X is A and G
  MISC_FEATURE (13)..(13): X is D and E for acidic amino acids
  MISC_FEATURE (14)..(14): X is N or Q for amidated amino acids
  MISC_FEATURE (15)..(15): X is A and G
  MISC_FEATURE (16)..(16): X is F or P
  MISC_FEATURE (17)..(17): X is K, R or H for basic amino acids
  MISC_FEATURE (18)..(18): X is A and G
  MISC_FEATURE (19)..(19): X is D and E for acidic amino acids
  MISC_FEATURE (20)..(20): X is F or P
  MISC_FEATURE (21)..(21): X is A and G
  MISC_FEATURE (22)..(22): X is A and G
  MISC_FEATURE (23)..(23): X is A and G
  MISC_FEATURE (24)..(24): X is 5-aminopentanoic acid for replacement of 3 or 4 amino acids of X2 and  X3
  MISC_FEATURE (25)..(25): X is D and E for acidic amino acids
  MISC_FEATURE (26)..(26): X is A and G
  MISC_FEATURE (27)..(27): X is N or Q for amidated amino acids
  MISC_FEATURE (28)..(28): X is D and E for acidic amino acids
  MISC_FEATURE (29)..(29): X is D and E for acidic amino acids
  MISC_FEATURE (30)..(30): X is K, R or H for basic amino acids
  MISC_FEATURE (31)..(31): X is A and G
  MISC_FEATURE (32)..(32): X is A and G
  MISC_FEATURE (33)..(33): X is I, L or V
  MISC_FEATURE (34)..(34): X is I, L or V
  MISC_FEATURE (35)..(35): X is C or S
  MISC_FEATURE (36)..(36): X is T or S
  MISC_FEATURE (37)..(37): X is A and G
  misc_feature (38)..(38): Xaa can be any naturally occurring amino acid
  MISC_FEATURE (39)..(39): X is I, L or V

SEQ ID NO: 865 - protein, 36 aa, artificial; identical to SEQ ID NO: 172
  Completely synthesized peptide construct
  MISC_FEATURE (1)..(1): X is T or S
  MISC_FEATURE (2)..(2): X is A and G
  MISC_FEATURE (3)..(3): X is A and G
  MISC_FEATURE (4)..(4): X is K, R or H for basic amino acids
  MISC_FEATURE (5)..(5): X is F or P
  MISC_FEATURE (6)..(6): X is A and G
  MISC_FEATURE (7)..(7): X is I, L or V
  MISC_FEATURE (8)..(8): X is A and G
  MISC_FEATURE (9)..(9): X is A and G
  MISC_FEATURE (10)..(10): X is F, W or Y for aromatic amino acids
  MISC_FEATURE (11)..(11): X is K, R or H for basic amino acids
  MISC_FEATURE (12)..(12): X is A and G
  MISC_FEATURE (13)..(13): X is D and E for acidic amino acids
  MISC_FEATURE (14)..(14): X is N or Q for amidated amino acids
  MISC_FEATURE (15)..(15): X is A and G
  MISC_FEATURE (16)..(16): X is F or P
  MISC_FEATURE (17)..(17): X is K, R or H for basic amino acids
  MISC_FEATURE (18)..(18): X is A and G
  MISC_FEATURE (19)..(19): X is D and E for acidic amino acids
  MISC_FEATURE (20)..(20): X is F or P
  MISC_FEATURE (21)..(21): X is A and G
  MISC_FEATURE (22)..(22): X is A and G
  MISC_FEATURE (23)..(23): X is A and G
  MISC_FEATURE (24)..(24): X is Acetyl or propionyl group, D glycine or D alanine, Cyclohexylalanine at amino terminus
  MISC_FEATURE (25)..(25): X is D and E for acidic amino acids
  MISC_FEATURE (26)..(26): X is A and G
  MISC_FEATURE (27)..(27): X is N or Q for amidated amino acids
  MISC_FEATURE (28)..(28): X is Gaba for X2X3 or X3X2 or X2X3 or X3X2 or X3X3 or X2X2
  MISC_FEATURE (29)..(29): X is K, R or H for basic amino acids
  MISC_FEATURE (30)..(30): X is A and G
  MISC_FEATURE (31)..(31): X is A and G
  MISC_FEATURE (32)..(32): X is Gaba for X2X3 or X3X2 or X2X3 or X3X2 or X3X3 or X2X2
  MISC_FEATURE (33)..(33): X is C or S
  MISC_FEATURE (34)..(34): X is Tor S
  MISC_FEATURE (35)..(35): X is A and G
  MISC_FEATURE (36)..(36): X is Gaba for X2X3 or X3X2 or X2X3 or X3X2 or X3X3 or X2X2

SEQ ID NO: 866 - protein, 33 aa, artificial; identical to SEQ ID NO: 99
  Completely synthesized peptide construct
  MISC_FEATURE (1)..(1): X is T or S
  MISC_FEATURE (2)..(2): X is X1X1 or X1X3 or X3X1 or X1X2 or X2X1
  MISC_FEATURE (3)..(3): X is K, R or H for basic amino acids
  MISC_FEATURE (4)..(4): X is F or P
  MISC_FEATURE (5)..(5): X is Gaba for X2X3 or X3X2 or X2X3 or X3X2 or X3X3 or X2X2
  MISC_FEATURE (6)..(6): X is X1X1 or X1X3 or X3X1 or X1X2 or X2X1
  MISC_FEATURE (7)..(7): X is F, W or Y for aromatic amino acids
  MISC_FEATURE (8)..(8): X is K, R or H for basic amino acids
  MISC_FEATURE (9)..(9): X is X1X1 or X1X3 or X3X1 or X1X2 or X2X1
  MISC_FEATURE (10)..(10): X is N or Q for amidated amino acids
  MISC_FEATURE (11)..(11): X is A and G
  MISC_FEATURE (12)..(12): X is F or P
  MISC_FEATURE (13)..(13): X is K, R or H for basic amino acids
  MISC_FEATURE (14)..(14): X is X1X1 or X1X3 or X3X1 or X1X2 or X2X1
  MISC_FEATURE (15)..(15): X is F or P
  MISC_FEATURE (16)..(16): X is A and G
  MISC_FEATURE (17)..(17): X is A and G
  MISC_FEATURE (18)..(18): X is A and G
  MISC_FEATURE (19)..(19): X is D and E for acidic amino acids
  MISC_FEATURE (20)..(20): X is A and g
  MISC_FEATURE (21)..(21): X is N or Q for amidated amino acids
  MISC_FEATURE (22)..(22): X is D and E for acidic amino acids
  MISC_FEATURE (23)..(23): X is D and E for acidic amino acids
  MISC_FEATURE (24)..(24): X is K, R or H for basic amino acids
  MISC_FEATURE (25)..(25): X is A and G
  MISC_FEATURE (26)..(26): X is A and G
  MISC_FEATURE (27)..(27): X is I, L or V
  MISC_FEATURE (28)..(28): X is I, L or V
  MISC_FEATURE (29)..(29): X is C or S
  MISC_FEATURE (30)..(30): X is T or S
  MISC_FEATURE (31)..(31): X is A and G
  MISC_FEATURE (32)..(32): X is I, L or V
  MISC_FEATURE (33)..(33): X is I, L or V

SEQ ID NO: 867 - protein, 34 aa, artificial; identical to SEQ ID NO: 79
  Completely synthesized peptide construct
  MISC_FEATURE (1)..(1): X is T or S
  MISC_FEATURE (2)..(2): X is X1X1 or X1X3 or X3X1 or X1X2 or X2X1
  MISC_FEATURE (3)..(3): X is K, R or H for basic amino acids
  MISC_FEATURE (4)..(4): X is F or P
  MISC_FEATURE (5)..(5): X is Gaba for X2X3 or X3X2 or X2X3 or X3X2 or X3X3 or X2X2
  MISC_FEATURE (6)..(6): X is X1X1 or X1X3 or X3X1 or X1X2 or X2X1
  MISC_FEATURE (7)..(7): X is F, W or Y for aromatic amino acids
  MISC_FEATURE (8)..(8): X is K, R or H for basic amino acids
  MISC_FEATURE (9)..(9): X is X1X1 or X1X3 or X3X1 or X1X2 or X2X1
  MISC_FEATURE (10)..(10): X is N or Q for amidated amino acids
  MISC_FEATURE (11)..(11): X is A and G
  MISC_FEATURE (12)..(12): X is F or P
  MISC_FEATURE (13)..(13): X is K, R or H for basic amino acids
  MISC_FEATURE (14)..(14): X is X1X1 or X1X3 or X3X1 or X1X2 or X2X1
  MISC_FEATURE (15)..(15): X is F or P
  MISC_FEATURE (16)..(16): X is A and G
  MISC_FEATURE (17)..(17): X is A and G
  MISC_FEATURE (18)..(18): X is A and G
  MISC_FEATURE (19)..(19): X is Acetyl or propionyl group, D glycine or D alanine, Cyclohexylalanine at amino terminus
  MISC_FEATURE (20)..(20): X is D and E for acidic amino acids
  MISC_FEATURE (21)..(21): X is A and G
  MISC_FEATURE (22)..(22): X is N or Q for amidated amino acids
  MISC_FEATURE (23)..(23): X is D and E for acidic amino acids
  MISC_FEATURE (24)..(24): X is D and E for acidic amino acids
  MISC_FEATURE (25)..(25): X is K, R or H for basic amino acids
  MISC_FEATURE (26)..(26): X is A and G
  MISC_FEATURE (27)..(27): X is A and G
  MISC_FEATURE (28)..(28): X is I, L or V
  MISC_FEATURE (29)..(29): X is I, L or V
  MISC_FEATURE (30)..(30): X is C or S
  MISC_FEATURE (31)..(31): X is T or S
  MISC_FEATURE (32)..(32): X is A and G
  MISC_FEATURE (33)..(33): X is I, L or V
  MISC_FEATURE (34)..(34): X is I, L or V

SEQ ID NO: 868 - protein, 33 aa, artificial; identical to SEQ ID NO: 99
  Completely synthesized peptide construct
  MISC_FEATURE (1)..(1): X is T or S
  MISC_FEATURE (2)..(2): X is X1X1 or X1X3 or X3X1 or X1X2 or X2X1
  MISC_FEATURE (3)..(3): X is K, R or H for basic amino acids
  MISC_FEATURE (4)..(4): X is F or P
  MISC_FEATURE (5)..(5): X is Gaba for X2X3 or X3X2 or X2X3 or X3X2 or X3X3 or X2X2
  MISC_FEATURE (6)..(6): X is X1X1 or X1X3 or X3X1 or X1X2 or X2X1
  MISC_FEATURE (7)..(7): X is F, W or Y for aromatic amino acids
  MISC_FEATURE (8)..(8): X is K, R or H for basic amino acids
  MISC_FEATURE (9)..(9): X is X1X1 or X1X3 or X3X1 or X1X2 or X2X1
  MISC_FEATURE (10)..(10): X is N or Q for amidated amino acids
  MISC_FEATURE (11)..(11): X is A and G
  MISC_FEATURE (12)..(12): X is F or P
  MISC_FEATURE (13)..(13): X is K, R or H for basic amino acids
  MISC_FEATURE (14)..(14): X is X1X1 or X1X3 or X3X1 or X1X2 or X2X1
  MISC_FEATURE (15)..(15): X is F or P
  MISC_FEATURE (16)..(16): X is A and G
  MISC_FEATURE (17)..(17): X is A and G
  MISC_FEATURE (18)..(18): X is A and G
  MISC_FEATURE (19)..(19): X is 5-aminopentanoic acid for replacement of 3 or 4 amino acids of X2 and  X3
  MISC_FEATURE (20)..(20): X is D and E for acidic amino acids
  MISC_FEATURE (21)..(21): X is A and G
  MISC_FEATURE (22)..(22): X is N or Q for amidated amino acids
  MISC_FEATURE (23)..(23): X is D and E for acidic amino acids
  MISC_FEATURE (24)..(24): X is D and E for acidic amino acids
  MISC_FEATURE (25)..(25): X is K, R or H for basic amino acids
  MISC_FEATURE (26)..(26): X is A and G
  MISC_FEATURE (27)..(27): X is A and G
  MISC_FEATURE (28)..(28): X is I, L or V
  MISC_FEATURE (29)..(29): X is I, L or V
  MISC_FEATURE (30)..(30): X is C or S
  MISC_FEATURE (31)..(31): X is T or S
  MISC_FEATURE (32)..(32): X is A and G
  MISC_FEATURE (33)..(33): X is I, L or V
  MISC_FEATURE (34)..(34): X is I, L or V

SEQ ID NO: 869 - protein, 31 aa, artificial; identical to SEQ ID NO: 130
  Completely synthesized peptide construct
  MISC_FEATURE (1)..(1): X is T or S
  MISC_FEATURE (2)..(2): X is X1X1 or X1X3 or X3X1 or X1X2 or X2X1
  MISC_FEATURE (3)..(3): X is K, R or H for basic amino acids
  MISC_FEATURE (4)..(4): X is F or P
  MISC_FEATURE (5)..(5): X is Gaba for X2X3 or X3X2 or X2X3 or X3X2 or X3X3 or X2X2
  MISC_FEATURE (6)..(6): X is X1X1 or X1X3 or X3X1 or X1X2 or X2X1
  MISC_FEATURE (7)..(7): X is F, W or Y for aromatic amino acids
  MISC_FEATURE (8)..(8): X is K, R or H for basic amino acids
  MISC_FEATURE (9)..(9): X is X1X1 or X1X3 or X3X1 or X1X2 or X2X1
  MISC_FEATURE (10)..(10): X is N or Q for amidated amino acids
  MISC_FEATURE (11)..(11): X is A and G
  MISC_FEATURE (12)..(12): X is F or P
  MISC_FEATURE (13)..(13): X is K, R or H for basic amino acids
  MISC_FEATURE (14)..(14): X is X1X1 or X1X3 or X3X1 or X1X2 or X2X1
  MISC_FEATURE (15)..(15): X is F or P
  MISC_FEATURE (16)..(16): X is Acetyl or propionyl group, D glycine or D alanine, Cyclohexylalanine at amino terminus
  MISC_FEATURE (17)..(17): X is A and G
  MISC_FEATURE (18)..(18): X is A and G
  MISC_FEATURE (19)..(19): X is A and G
  MISC_FEATURE (20)..(20): X is D and E for acidic amino acids
  MISC_FEATURE (21)..(21): X is A and G
  MISC_FEATURE (22)..(22): X is N or Q for amidated amino acids
  MISC_FEATURE (23)..(23): X is Gaba for X2X3 or X3X2 or X2X3 or X3X2 or X3X3 or X2X2
  MISC_FEATURE (24)..(24): X is K, R or H for basic amino acids
  MISC_FEATURE (25)..(25): X is A and G
  MISC_FEATURE (26)..(26): X is A and G
  MISC_FEATURE (27)..(27): X is Gaba for X2X3 or X3X2 or X2X3 or X3X2 or X3X3 or X2X2
  MISC_FEATURE (28)..(28): X is C or S
  MISC_FEATURE (29)..(29): X is T or S
  MISC_FEATURE (30)..(30): X is A and G
  MISC_FEATURE (31)..(31): X is Gaba for X2X3 or X3X2 or X2X3 or X3X2 or X3X3 or X2X2

SEQ ID NO: 870 - protein, 36 aa, artificial
  Completely synthesized peptide construct
TGGKPGIAGFKGEQGPKGEPGGGDLLKNGERIEKVE

SEQ ID NO: 871 - protein, 36 aa, artificial; identical to SEQ ID NO: 172
  Completely synthesized peptide construct
  MISC_FEATURE (1)..(1): X is T or S
  MISC_FEATURE (2)..(2): X is A and G
  MISC_FEATURE (3)..(3): X is A and G
  MISC_FEATURE (4)..(4): X is K, R or H for basic amino acids
  MISC_FEATURE (5)..(5): X is F or P
  MISC_FEATURE (6)..(6): X is A and G
  MISC_FEATURE (7)..(7): X is I, L or V
  MISC_FEATURE (8)..(8): X is A and G
  MISC_FEATURE (9)..(9): X is A and G
  MISC_FEATURE (10)..(10): X is F, W or Y for aromatic amino acids
  MISC_FEATURE (11)..(11): X is K, R or H for basic amino acids
  MISC_FEATURE (12)..(12): X is A and G
  MISC_FEATURE (13)..(13): X is D and E for acidic amino acids
  MISC_FEATURE (14)..(14): X is N or Q for amidated amino acids
  MISC_FEATURE (15)..(15): X is A and G
  MISC_FEATURE (16)..(16): X is F or P
  MISC_FEATURE (17)..(17): X is K, R or H for basic amino acids
  MISC_FEATURE (18)..(18): X is A and G
  MISC_FEATURE (19)..(19): X is D and E for acidic amino acids
  MISC_FEATURE (20)..(20): X is F or P
  MISC_FEATURE (21)..(21): X is A and G
  MISC_FEATURE (22)..(22): X is A and G
  MISC_FEATURE (23)..(23): X is A and G
  MISC_FEATURE (24)..(24): X is D and E for acidic amino acids
  MISC_FEATURE (25)..(25): X is I, L or V
  MISC_FEATURE (26)..(26): X is I, L or V
  MISC_FEATURE (27)..(27): X is K, R or H for basic amino acids
  MISC_FEATURE (28)..(28): X is N or Q for amidated amino acids
  MISC_FEATURE (29)..(29): X is A and G
  MISC_FEATURE (30)..(30): X is D and E for acidic amino acids
  MISC_FEATURE (31)..(31): X is K, R or H for basic amino acids
  MISC_FEATURE (32)..(32): X is I, L or V
  MISC_FEATURE (33)..(33): X is D and E for acidic amino acids
  MISC_FEATURE (34)..(34): X is K, R or H for basic amino acids
  MISC_FEATURE (35)..(35): X is I, L or V
  MISC_FEATURE (36)..(36): X is D and E for acidic amino acids

SEQ ID NO: 872 - protein, 37 aa, artificial; identical to SEQ ID NO: 158
  Completely synthesized peptide construct
  MISC_FEATURE (1)..(1): X is T or S
  MISC_FEATURE (2)..(2): X is A and G
  MISC_FEATURE (3)..(3): X is A and G
  MISC_FEATURE (4)..(4): X is K, R or H for basic amino acids
  MISC_FEATURE (5)..(5): X is F or P
  MISC_FEATURE (6)..(6): X is A and G
  MISC_FEATURE (7)..(7): X is I, L or V
  MISC_FEATURE (8)..(8): X is A and G
  MISC_FEATURE (9)..(9): X is A and G
  MISC_FEATURE (10)..(10): X is F, W or Y for aromatic amino acids
  MISC_FEATURE (11)..(11): X is K, R or H for basic amino acids
  MISC_FEATURE (12)..(12): X is A and G
  MISC_FEATURE (13)..(13): X is D and E for acidic amino acids
  MISC_FEATURE (14)..(14): X is N or Q for amidated amino acids
  MISC_FEATURE (15)..(15): X is A and G
  MISC_FEATURE (16)..(16): X is F or P
  MISC_FEATURE (17)..(17): X is K, R or H for basic amino acids
  MISC_FEATURE (18)..(18): X is A and G
  MISC_FEATURE (19)..(19): X is D and E for acidic amino acids
  MISC_FEATURE (20)..(20): X is F or P
  MISC_FEATURE (21)..(21): X is A and G
  MISC_FEATURE (22)..(22): X is A and G
  MISC_FEATURE (23)..(23): X is A and G
  MISC_FEATURE (24)..(24): X is Acetyl or propionyl group, D glycine or D alanine, Cyclohexylalanine at amino terminus
  MISC_FEATURE (25)..(25): X is D and E for acidic amino acids
  MISC_FEATURE (26)..(26): X is I, L or V
  MISC_FEATURE (27)..(27): X is I, L or V
  MISC_FEATURE (28)..(28): X is K, R or H for basic amino acids
  MISC_FEATURE (29)..(29): X is N or Q for amidated amino acids
  MISC_FEATURE (30)..(30): X is A and G
  MISC_FEATURE (31)..(31): X is D and E for acidic amino acids
  MISC_FEATURE (32)..(32): X is K, R or H for basic amino acids
  MISC_FEATURE (33)..(33): X is I, L or V
  MISC_FEATURE (34)..(34): X is D and E for acidic amino acids
  MISC_FEATURE (35)..(35): X is K, R or H for basic amino acids
  MISC_FEATURE (36)..(36): X is I, L or V
  MISC_FEATURE (37)..(37): X is D and E for acidic amino acids

SEQ ID NO: 873 - protein, 33 aa, artificial; identical to SEQ ID NO: 99
  Completely synthesized peptide construct
  MISC_FEATURE (1)..(1): X is T or S
  MISC_FEATURE (2)..(2): X is A and G
  MISC_FEATURE (3)..(3): X is A and G
  MISC_FEATURE (4)..(4): X is K, R or H for basic amino acids
  MISC_FEATURE (5)..(5): X is F or P
  MISC_FEATURE (6)..(6): X is A and G
  MISC_FEATURE (7)..(7): X is I, L or V
  MISC_FEATURE (8)..(8): X is A and G
  MISC_FEATURE (9)..(9): X is A and G
  MISC_FEATURE (10)..(10): X is F, W or Y for aromatic amino acids
  MISC_FEATURE (11)..(11): X is K, R or H for basic amino acids
  MISC_FEATURE (12)..(12): X is A and G
  MISC_FEATURE (13)..(13): X is D and E for acidic amino acids
  MISC_FEATURE (14)..(14): X is N or Q for amidated amino acids
  MISC_FEATURE (15)..(15): X is A and G
  MISC_FEATURE (16)..(16): X is F or P
  MISC_FEATURE (17)..(17): X is K, R or H for basic amino acids
  MISC_FEATURE (18)..(18): X is A and G
  MISC_FEATURE (19)..(19): X is D and E for acidic amino acids
  MISC_FEATURE (20)..(20): X is F or P
  MISC_FEATURE (21)..(21): X is A and G
  MISC_FEATURE (22)..(22): X is A and G
  MISC_FEATURE (23)..(23): X is A and G
  MISC_FEATURE (24)..(24): X is Acetyl or propionyl group, D glycine or D alanine, Cyclohexylalanine at amino terminus
  MISC_FEATURE (25)..(25): X is Gaba for X2X3 or X3X2 or X2X3 or X3X2 or X3X3 or X2X2
  MISC_FEATURE (26)..(26): X is K, R or H for basic amino acids
  MISC_FEATURE (27)..(27): X is N or Q for amidated amino acids
  MISC_FEATURE (28)..(28): X is A and G
  MISC_FEATURE (29)..(29): X is D and E for acidic amino acids
  MISC_FEATURE (30)..(30): X is K, R or H for basic amino acids
  MISC_FEATURE (31)..(31): X is Gaba for X2X3 or X3X2 or X2X3 or X3X2 or X3X3 or X2X2
  MISC_FEATURE (32)..(32): X is K, R or H for basic amino acids
  MISC_FEATURE (33)..(33): X is Gaba for X2X3 or X3X2 or X2X3 or X3X2 or X3X3 or X2X2

SEQ ID NO: 874 - protein, 33 aa, artificial; identical to SEQ ID NO: 99
  Completely synthesized peptide construct
  MISC_FEATURE (1)..(1): X is T or S
  MISC_FEATURE (2)..(2): X is A and G
  MISC_FEATURE (3)..(3): X is A and G
  MISC_FEATURE (4)..(4): X is K, R or H for basic amino acids
  MISC_FEATURE (5)..(5): X is F or P
  MISC_FEATURE (6)..(6): X is A and G
  MISC_FEATURE (7)..(7): X is I, L or V
  MISC_FEATURE (8)..(8): X is A and G
  MISC_FEATURE (9)..(9): X is A and G
  MISC_FEATURE (10)..(10): X is F, W or Y for aromatic amino acids
  MISC_FEATURE (11)..(11): X is K, R or H for basic amino acids
  MISC_FEATURE (12)..(12): X is A and G
  MISC_FEATURE (13)..(13): X is D and E for acidic amino acids
  MISC_FEATURE (14)..(14): X is N or Q for amidated amino acids
  MISC_FEATURE (15)..(15): X is A and G
  MISC_FEATURE (16)..(16): X is F or P
  MISC_FEATURE (17)..(17): X is K, R or H for basic amino acids
  MISC_FEATURE (18)..(18): X is A and G
  MISC_FEATURE (19)..(19): X is D and E for acidic amino acids
  MISC_FEATURE (20)..(20): X is F or P
  MISC_FEATURE (21)..(21): X is A and G
  MISC_FEATURE (22)..(22): X is A and G
  MISC_FEATURE (23)..(23): X is A and G
  MISC_FEATURE (24)..(24): X is Acetyl or propionyl group, D glycine or D alanine, Cyclohexylalanine at amino terminus
  MISC_FEATURE (25)..(25): X is 5-aminopentanoic acid for replacement of 3 or 4 amino acids of X2 and  X3
  MISC_FEATURE (26)..(26): X is K, R or H for basic amino acids
  MISC_FEATURE (27)..(27): X is N or Q for amidated amino acids
  MISC_FEATURE (28)..(28): X is A and G
  MISC_FEATURE (29)..(29): X is D and E for acidic amino acids
  MISC_FEATURE (30)..(30): X is K, R or H for basic amino acids
  MISC_FEATURE (31)..(31): X is Gaba for X2X3 or X3X2 or X2X3 or X3X2 or X3X3 or X2X2
  MISC_FEATURE (32)..(32): X is K, R or H for basic amino acids
  MISC_FEATURE (33)..(33): X is Gaba for X2X3 or X3X2 or X2X3 or X3X2 or X3X3 or X2X2

SEQ ID NO: 875 - protein, 33 aa, artificial; identical to SEQ ID NO: 99
  Completely synthesized peptide construct
  MISC_FEATURE (1)..(1): X is T or S
  MISC_FEATURE (2)..(2): X is X1X1 or X1X3 or X3X1 or X1X2 or X2X1
  MISC_FEATURE (3)..(3): X is K, R or H for basic amino acids
  MISC_FEATURE (4)..(4): X is F or P
  MISC_FEATURE (5)..(5): X is Gaba for X2X3 or X3X2 or X2X3 or X3X2 or X3X3 or X2X2
  MISC_FEATURE (6)..(6): X is X1X1 or X1X3 or X3X1 or X1X2 or X2X1
  MISC_FEATURE (7)..(7): X is F, W or Y for aromatic amino acids
  MISC_FEATURE (8)..(8): X is K, R or H for basic amino acids
  MISC_FEATURE (9)..(9): X is X1X1 or X1X3 or X3X1 or X1X2 or X2X1
  MISC_FEATURE (10)..(10): X is N or Q for amidated amino acids
  MISC_FEATURE (11)..(11): X is A and G
  MISC_FEATURE (12)..(12): X is F or P
  MISC_FEATURE (13)..(13): X is K, R or H for basic amino acids
  MISC_FEATURE (14)..(14): X is X1X1 or X1X3 or X3X1 or X1X2 or X2X1
  MISC_FEATURE (15)..(15): X is F or P
  MISC_FEATURE (16)..(16): X is A and G
  MISC_FEATURE (17)..(17): X is A and G
  MISC_FEATURE (18)..(18): X is A and G
  MISC_FEATURE (19)..(19): X is D and E for acidic amino acids
  MISC_FEATURE (20)..(20): X is A and G
  MISC_FEATURE (21)..(21): X is N or Q for amidated amino acids
  MISC_FEATURE (22)..(22): X is D and E for acidic amino acids
  MISC_FEATURE (23)..(23): X is D and E for acidic amino acids
  MISC_FEATURE (24)..(24): X is K, R or H for basic amino acids
  MISC_FEATURE (25)..(25): X is A and G
  MISC_FEATURE (26)..(26): X is A and G
  MISC_FEATURE (27)..(27): X is I, L or V
  MISC_FEATURE (28)..(28): X is I, L or V
  MISC_FEATURE (29)..(29): X is C or S
  MISC_FEATURE (30)..(30): X is T or S
  MISC_FEATURE (31)..(31): X is A and G
  MISC_FEATURE (32)..(32): X is I, L or V
  MISC_FEATURE (33)..(33): X is I, L or V

SEQ ID NO: 876 - protein, 34 aa, artificial; identical to SEQ ID NO: 79
  Completely synthesized peptide construct
  MISC_FEATURE (1)..(1): X isT or S
  MISC_FEATURE (2)..(2): X is X1X1 or X1X3 or X3X1 or X1X2 or X2X1
  MISC_FEATURE (3)..(3): X is K, R or H for basic amino acids
  MISC_FEATURE (4)..(4): X is F or P
  MISC_FEATURE (5)..(5): X is Gaba for X2X3 or X3X2 or X2X3 or X3X2 or X3X3 or X2X2
  MISC_FEATURE (6)..(6): X is X1X1 or X1X3 or X3X1 or X1X2 or X2X1
  MISC_FEATURE (7)..(7): X is F, W or Y for aromatic amino acids
  MISC_FEATURE (8)..(8): X is K, R or H for basic amino acids
  MISC_FEATURE (9)..(9): X is X1X1 or X1X3 or X3X1 or X1X2 or X2X1
  MISC_FEATURE (10)..(10): X is N or Q for amidated amino acids
  MISC_FEATURE (11)..(11): X is A and G
  MISC_FEATURE (12)..(12): X is F or P
  MISC_FEATURE (13)..(13): X is K, R or H for basic amino acids
  MISC_FEATURE (14)..(14): X is X1X1 or X1X3 or X3X1 or X1X2 or X2X1
  MISC_FEATURE (15)..(15): X is F or P
  MISC_FEATURE (16)..(16): X is A and G
  MISC_FEATURE (17)..(17): X is A and G
  MISC_FEATURE (18)..(18): X is A and G
  MISC_FEATURE (19)..(19): X is Acetyl or propionyl group, D glycine or D alanine, Cyclohexylalanine at amino terminus
  MISC_FEATURE (20)..(20): X is D and E for acidic amino acids
  MISC_FEATURE (21)..(21): X is A and G
  MISC_FEATURE (22)..(22): X is N or Q for amidated amino acids
  MISC_FEATURE (23)..(23): X is D and E for acidic amino acids
  MISC_FEATURE (24)..(24): X is D and E for acidic amino acids
  MISC_FEATURE (25)..(25): X is K, R or H for basic amino acids
  MISC_FEATURE (26)..(26): X is A and G
  MISC_FEATURE (27)..(27): X is A and G
  MISC_FEATURE (28)..(28): X is I, L or V
  MISC_FEATURE (29)..(29): X is I, L or V
  MISC_FEATURE (30)..(30): X is C or S
  MISC_FEATURE (31)..(31): X is T or S
  MISC_FEATURE (32)..(32): X is A and G
  MISC_FEATURE (33)..(33): X is I, L or V
  MISC_FEATURE (34)..(34): X is I, L or V

SEQ ID NO: 877 - protein, 34 aa, artificial; identical to SEQ ID NO: 79
  Completely synthesized peptide construct
  MISC_FEATURE (1)..(1): X is T or S
  MISC_FEATURE (2)..(2): X is X1X1 or X1X3 or X3X1 or X1X2 or X2X1
  MISC_FEATURE (3)..(3): X is K, R or H for basic amino acids
  MISC_FEATURE (4)..(4): X is F or P
  MISC_FEATURE (5)..(5): X is Gaba for X2X3 or X3X2 or X2X3 or X3X2 or X3X3 or X2X2
  MISC_FEATURE (6)..(6): X is X1X1 or X1X3 or X3X1 or X1X2 or X2X1
  MISC_FEATURE (7)..(7): X is F, W or Y for aromatic amino acids
  MISC_FEATURE (8)..(8): X is K, R or H for basic amino acids
  MISC_FEATURE (9)..(9): X is X1X1 or X1X3 or X3X1 or X1X2 or X2X1
  MISC_FEATURE (10)..(10): X is N or Q for amidated amino acids
  MISC_FEATURE (11)..(11): X is A and G
  MISC_FEATURE (12)..(12): X is F or P
  MISC_FEATURE (13)..(13): X is K, R or H for basic amino acids
  MISC_FEATURE (14)..(14): X is X1X1 or X1X3 or X3X1 or X1X2 or X2X1
  MISC_FEATURE (15)..(15): X is F or P
  MISC_FEATURE (16)..(16): X is A and G
  MISC_FEATURE (17)..(17): X is A and G
  MISC_FEATURE (18)..(18): X is A and G
  MISC_FEATURE (19)..(19): X is 5-aminopentanoic acid for replacement of 3 or 4 amino acids of X2 and  X3
  MISC_FEATURE (20)..(20): X is D and E for acidic amino acids
  MISC_FEATURE (21)..(21): X is A and G
  MISC_FEATURE (22)..(22): X is N or Q for amidated amino acids
  MISC_FEATURE (23)..(23): X is D and E for acidic amino acids
  MISC_FEATURE (24)..(24): X is D and E for acidic amino acids
  MISC_FEATURE (25)..(25): X is K, R or H for basic amino acids
  MISC_FEATURE (26)..(26): X is A and G
  MISC_FEATURE (27)..(27): X is A and G
  MISC_FEATURE (28)..(28): X is I, L or V
  MISC_FEATURE (29)..(29): X is I, L or V
  MISC_FEATURE (30)..(30): X is C or S
  MISC_FEATURE (31)..(31): X is T or S
  MISC_FEATURE (32)..(32): X is A an G
  MISC_FEATURE (33)..(33): X is I, L or V
  MISC_FEATURE (34)..(34): X is I, L or V

SEQ ID NO: 878 - protein, 31 aa, artificial; identical to SEQ ID NO: 130
  Completely synthesized peptide construct
  MISC_FEATURE (1)..(1): X is T or S
  MISC_FEATURE (2)..(2): X is X1X1 or X1X3 or X3X1 or X1X2 or X2X1
  MISC_FEATURE (3)..(3): X is K, R or H for basic amino acids
  MISC_FEATURE (4)..(4): X is F or P
  MISC_FEATURE (5)..(5): X is Gaba for X2X3 or X3X2 or X2X3 or X3X2 or X3X3 or X2X2
  MISC_FEATURE (6)..(6): X is X1X1 or X1X3 or X3X1 or X1X2 or X2X1
  MISC_FEATURE (7)..(7): X is F, W or Y for aromatic amino acids
  MISC_FEATURE (8)..(8): X is K, R or H for basic amino acids
  MISC_FEATURE (9)..(9): X is X1X1 or X1X3 or X3X1 or X1X2 or X2X1
  MISC_FEATURE (10)..(10): X is N or Q for amidated amino acids
  MISC_FEATURE (11)..(11): X is A and G
  MISC_FEATURE (12)..(12): X is F or P
  MISC_FEATURE (13)..(13): X is K, R or H for basic amino acids
  MISC_FEATURE (14)..(14): X is X1X1 or X1X3 or X3X1 or X1X2 or X2X1
  MISC_FEATURE (15)..(15): X is F or P
  MISC_FEATURE (16)..(16): X is Acetyl or propionyl group, D glycine or D alanine, Cyclohexylalanine at amino terminus
  MISC_FEATURE (17)..(17): X is A and G
  MISC_FEATURE (18)..(18): X is A and G
  MISC_FEATURE (19)..(19): X is A and G
  MISC_FEATURE (20)..(20): X is D and E for acidic amino acids
  MISC_FEATURE (21)..(21): X is A and G
  MISC_FEATURE (22)..(22): X is N or Q for amidated amino acids
  MISC_FEATURE (23)..(23): X is Gaba for X2X3 or X3X2 or X2X3 or X3X2 or X3X3 or X2X2
  MISC_FEATURE (24)..(24): X is K, R or H for basic amino acids
  MISC_FEATURE (25)..(25): X is A and G
  MISC_FEATURE (26)..(26): X is A and G
  MISC_FEATURE (27)..(27): X is Gaba for X2X3 or X3X2 or X2X3 or X3X2 or X3X3 or X2X2
  MISC_FEATURE (28)..(28): X is C or S
  MISC_FEATURE (29)..(29): X is T or S
  MISC_FEATURE (30)..(30): X is A and G
  MISC_FEATURE (31)..(31): X is Gaba for X2X3 or X3X2 or X2X3 or X3X2 or X3X3 or X2X2

SEQ ID NO: 879 - protein, 20 aa, artificial
  Completely synthesized peptide construct
DAGEPGIAGFKGDQGPKGET
